(19) United States
(12) Patent Application Publication
(10) Pub. No.: US 2023/0159956 A1
(43) Pub. Date: May 25, 2023

(54) METHODS OF EDITING SINGLE NUCLEOTIDE POLYMORPHISM USING PROGRAMMABLE BASE EDITOR SYSTEMS

(71) Applicant: Beam Therapeutics Inc., Cambridge, MA (US)

(72) Inventors: David Bryson, Cambridge, MA (US); John Evans, Cambridge, MA (US); Michael Packer, Cambridge, MA (US); Jason Michael Gehrke, Cambridge, MA (US); Natalie Petrossian, Cambridge, MA (US)

(73) Assignee: Beam Therapeutics Inc., Cambridge, MA (US)

(21) Appl. No.: 17/054,348

(22) PCT Filed: May 11, 2019
(86) PCT No.: PCT/US2019/031898

§ 371 Date: Nov. 10, 2020

Related U.S. Application Data
(60) Provisional application No. 62/670,588, filed on May 11, 2018.
(60) Provisional application No. 62/780,838, filed on Dec. 17, 2018.
(60) Provisional application No. 62/817,986, filed on Mar. 13, 2019.

(51) Int. Cl. C12N 15/90; C12N 15/11; C12N 15/10; C12N 9/22; C12N 9/78; C12N 5/071; A61K 31/7088; A61K 38/46; A61K 48/00; A61K 38/57; A61P 3/00

(52) U.S. Cl. CPC C12N 15/907; C12N 15/11; C12N 15/102; C12N 9/22; C12N 9/78; C12Y 305/04004; C12N 5/067; A61K 31/7088; A61K 38/465; A61K 48/0025; A61K 38/57; A61P 3/00; C12N 2310/20; C12N 2800/80; C12N 2506/45

(57) ABSTRACT

Provided herein are compositions and methods of using base editors comprising a polynucleotide programmable nucleotide binding domain and a nucleobase editing domain in conjunction with a guide polynucleotide. Also provided herein are base editor systems for editing nucleobases of target nucleotide sequences.

### RELATED APPLICATIONS

[0001] This application is the U.S. national phase application, pursuant to 35 U.S.C. § 371, of PCT International Application No.: PCT/US2019/031898, filed May 11, 2019, designating the United States and published in English, which claims priority to and benefit of U.S. Provisional Application No. 62/670,588, filed May 11, 2018, U.S. Provisional Application No. 62/780,838, filed Dec. 17, 2018 and U.S. Provisional Application No. 62/817,986, filed Mar. 13, 2019, each of which is incorporated herein by reference in its entirety.

### SEQUENCE LISTING

[0002] The instant application contains a Sequence Listing which has been submitted electronically in ASCII format and is hereby incorporated by reference in its entirety. The ASCII copy, created on Apr. 23, 2021, is named 52885-729_601_SL.txt and is 732,672 bytes in size.

### BACKGROUND OF THE DISCLOSURE

[0003] For most known genetic diseases, correction of a point mutation in the target locus, rather than stochastic disruption of the gene, is needed to study or address the underlying cause of the disease. Current genome editing technologies utilizing the clustered regularly interspaced short palindromic repeat (CRISPR) system introduce double-stranded DNA breaks at a target locus as the first step to gene correction. In response to double-stranded DNA breaks, cellular DNA repair processes mostly result in random insertions or deletions (indels) at the site of DNA cleavage through non-homologous end joining. Although most genetic diseases arise from point mutations, current approaches to point mutation correction are inefficient and typically induce an abundance of random insertions and deletions (indels) at the target locus resulting from the cellular response to dsDNA breaks. Therefore, there is a need for an improved form of genome editing that is more efficient and with far fewer undesired products such as stochastic insertions or deletions (indels) or translocations.

[0004] Alpha-1 Antitrypsin Deficiency (A1AD) is a genetic disease in which pathogenic mutations in the SERPINA1 gene that encodes the alpha-1 antitrypsin (A1AT) protein lead to diminished protein production in individuals having the disease. A1AT is a particularly good inhibitor of neutrophil elastase and protects tissues and organs such as the lung from elastin degradation. Consequently, elastin in the lungs of patients having A1AD is degraded more readily by neutrophil elastase, and over time, the loss in lung elasticity develops into chronic obstructive pulmonary disease (COPD). In healthy individuals, A1AT is produced by hepatocytes within the liver and is secreted into systemic circulation where the protein functions as a protease inhibitor.

[0005] The most common pathogenic A1AT variant is a Guanine to Adenine (G→A) mutation in the SERPINA1 gene, which results in a glutamate to lysine substitution at amino acid 342 of the A1AT protein. This substitution causes the protein to misfold and polymerize within hepatocytes, and ultimately, the toxic aggregates can lead to liver injury and cirrhosis. While the liver toxicity might potentially be addressed by a gene knockout (CRISPR/ZFN/TALEN) or gene knockdown (siRNA), neither of these approaches addresses the pulmonary pathology. Although pulmonary pathology may be addressed with protein replacement therapy, this therapy fails to address the liver toxicity. Gene therapy also would be inadequate to address the A1AT genetic defect. Because the livers of patients with A1AD are already under a severe disease burden caused by the endogenous A1 AT aggregation, gene therapy that increases A1AT in the liver would be counterproductive. Therefore, there is a need for a method of treating patients with A1AD that addresses both the lung pathology and the liver toxicity which accompany the disease.

### INCORPORATION BY REFERENCE

[0006] All publications, patents, and patent applications mentioned in this specification are herein incorporated by reference to the same extent as if each individual publication, patent, or patent application was specifically and individually indicated to be incorporated by reference. Absent any indication otherwise, publications, patents, and patent applications mentioned in this specification are incorporated herein by reference in their entireties.

### SUMMARY OF THE DISCLOSURE

[0007] As described herein, compositions and methods for the precise correction of pathogenic amino acids in a protein associated with a disease or disorder using a programmable nucleobase editor are provided. In a particular aspect, the described compositions and methods are useful for the treatment of alpha-1 antitrypsin deficiency (A1AD). In an embodiment, the described compositions and methods for treating A1AD utilize an adenosine (A) base editor (ABE-(NGC variant)) to precisely correct a deleterious, single nucleotide polymorphism (SNP) in the endogenous SERPINA1 gene. In an embodiment, the compositions and methods correct the deleterious mutation, E342K, which affects the activity and function of the encoded alpha-1 antitrypsin (A1AT) protein. This correction simultaneously eliminates the pathogenic protein burden on the liver and restores functional protein to the lungs.

[0008] In one aspect, a method of editing a SERPINA1 polynucleotide containing a single nucleotide polymorphism (SNP) associated with Alpha1 Anti-Trypsin Deficiency (A1AD) is provided, in which the method involves contacting the SERPINA1 polynucleotide with a base editor in complex with one or more guide polynucleotides, where the base editor contains a polynucleotide programmable DNA binding domain and an adenosine deaminase domain, and where one or more of the guide polynucleotides target the base editor to effect an A⋅T to G⋅C alteration of the SNP in the SERPINA1 gene, which is associated with A1AD. In one embodiment, the method involves contacting a cell, e.g., a eukaryotic cell, a mammalian cell, or human cell. In another embodiment, the cell is in vivo or ex vivo.

[0009] In another aspect, the invention features a cell produced by introducing into the cell, or a progenitor thereof, a base editor, a polynucleotide encoding the base editor, where the base editor contains a polynucleotide programmable DNA binding domain and an adenosine deaminase domain; and one or more guide polynucleotides that target the base editor to effect an A⋅T to G⋅C alteration of the SNP in a gene, e.g., the SERPINA1 gene, associated with A1AD. In one embodiment, the cell produced is a hepatocyte. In another embodiment, the cell or progenitor thereof is an embryonic stem cell, induced pluripotent stem cell, or a hepatocyte. In another embodiment, the hepatocyte expresses an A1AT polypeptide. In another embodiment, the cell is from a subject having A1AD. In yet another embodiment, the cell is a mammalian cell or a human cell.

[0010] In another aspect, the invention features a method of treating A1AD in a subject containing administering to subject in need thereof a cell as described in the above delineated aspects and embodiments. In one embodiment, the cell is autologous or is allogeneic or xenogeneic to the subject.

[0011] In another aspect, the invention features aa isolated cell or population of cells propagated or expanded from the cell of any above-delineated aspect.

[0012] In another aspect, the invention features a method of treating A1AD in a subject, in which the method comprises administering to a subject in need thereof a base editor, or a polynucleotide encoding the base editor, where the base editor contains a polynucleotide programmable DNA binding domain and an adenosine deaminase domain; and one or more guide polynucleotides that target the base editor to effect an A⋅T to G⋅C alteration of the SNP in a gene, e.g., the SERPINA1 gene, associated with A1AD. In one embodiment, the subject is a mammal or a human. In another embodiment, the method involves delivering the base editor, or polynucleotide encoding the base editor, and the one or more guide polynucleotides to a cell of the subject. In yet another embodiment, the cell is a hepatocyte. In another embodiment, the cell is a progenitor of a hepatocyte. In yet another embodiment, the hepatocyte expresses an A1AT polypeptide containing a mutation.

[0013] In another aspect, the invention features a method of producing a hepatocyte or progenitor thereof, in which the method involves (a) introducing into an induced pluripotent stem cell or hepatocyte progenitor containing an SNP in a gene, e.g., the SERPINA1 gene, associated with A1AD, a base editor, or a polynucleotide encoding the base editor, where the base editor contains a polynucleotide-programmable nucleotide-binding domain and an adenosine deaminase domain; and one or more guide polynucleotides, where the one or more guide polynucleotides target the base editor to effect an A⋅T to G⋅C alteration of the SNP associated with A1AD; and (b) differentiating the induced pluripotent stem cell or hepatocyte progenitor into hepatocyte. In one embodiment, the method involves differentiating the induced pluripotent stem cell into a hepatocyte or progenitor thereof. In another embodiment, the induced pluripotent stem cell contains an E342K mutation. In another embodiment, the hepatocyte progenitor is obtained from a subject having A1AD. In yet another embodiment, the hepatocyte or hepatocyte progenitor is a mammalian cell or human cell.

[0014] In another aspect, the base editor (BE) used in the described compositions and methods comprises a polypeptide comprising the amino acid sequence: (i): MSEVEFSHEYWMRHALTLAKRAWDEREVPVGAVLVHNNRVIGEGWNRPIGRHDPTA HAEIMALRQGGLVMQNYRLIDATLYVTLEPCVMCAGAMIHSRIGRVVFGARDAKTGA AGSLMDVLHHPGMNHRVEITEGILADECAALLSDFFRMRRQEIKAQKKAQSSTDSGGSS GGSSGSETPGTSESATPESSGGSSGGSSEVEFSHEYWMRHALTLAKRARDEREVPVGAV LVLNNRVIGEGWNRAIGLHDPTAHAEIMALRQGGLVMQNYRLIDATLYVTFEPCVMCA GAMIHSRIGRVVFGVRNAKTGAAGSLMDVLHYPGMNHRVEITEGILADECAALLCYFF RMPRQVFNAQKKAQSSTDSGGSSGGSSGSETPGTSESATPESSGGSSGGSDKKYSIGLAI GTNSVGWAVITDEYKVPSKKFKVLGNTDRHSIKKNLIGALLFDSGETAEATRLKRTARR RYTRRKNRICYLQEIFSNEMAKVDDSFFHRLEESFLVEEDKKHERHPIFGNIVDEVAYHE KYPTIYHLRKKLVDSTDKADLRLIYLALAHMIKFRGHFLIEGDLNPDNSDVDKLFIQLVQ TYNQLFEENPINASGVDAKAILSARLSKSRRLENLIAQLPGEKKNGLFGNLIALSLGLTPN FKSNFDLAEDAKLQLSKDTYDDDLDNLLAQIGDQYADLFLAAKNLSDAILLSDILRVNT EITKAPLSASMIKRYDEHHQDLTLLKALVRQQLPEKYKEIFFDQSKNGYAGYIDGGASQ EEFYKFIKPILEKMDGTEELLVKLNREDLLRKQRTFDNGSIPHQIHLGELHAILRRQEDFY PFLKDNREKIEKILTFRIPYYVGPLARGNSRFAWMTRKSEETITPWNFEEVVDKGASAQS FIERMTNFDKNLPNEKVLPKHSLLYEYFTVYNELTKVKYVTEGMRKPAFLSGEQKKAIV DLLFKTNRKVTVKQLKEDYFKKIECFDSVEISGVEDRFNASLGTYHDLLKIIKDKDFLDN EENEDILEDIVLTLTLFEDREMIEERLKTYAHLFDDKVMKQLKRRRYTGWGRLSRKLIN GIRDKQSGKTILDFLKSDGFANRNFMQLIHDDSLTFKEDIQKAQVSGQGDSLHEHIANL AGSPAIKKGILQTVKVVDELVKVMGRHKPENIVIEMARENQTTQKGQKNSRERMKRIE EGIKELGSQILKEHPVENTQLQNEKLYLYYLQNGRDMYVDQELDINRLSDYDVDHIVPQ SFLKDDSIDNKVLTRSDKNRGKSDNVPSEEVVKKMKNYWRQLLNAKLITQRKFDNLTK AERGGLSELDKAGFIKRQLVETRQITKHVAQILDSRMNTKYDENDKLIREVKVITLKSK LVSDFRKDFQFYKVREINNYHHAHDAYLNAVVGTALIKKYPKLESEFVYGDYKVYDV RKMIAKSEQEIGKATAKYFFYSNIMNFFKTEITLANGEIRKRPLIETNGETGEIVWDKGR DFATVRKVLSMPQVNIVKKTEVQTGGFSKESILPKRNSDKLIARKKDWDPKKYGGFmqP TVAYSVLVVAKVEKGKSKKLKSVKELLGITIMERSSFEKNPIDFLEAKGYKEVKKDLIIK LPKYSLFELENGRKRMLASAkfLQKGNELALPSKYVNFLYLASHYEKLKGSPEDNEQKQ LFVEQHKHYLDEIIEQISEFSKRVILADANLDKVLSAYNKHRDKPIREQAENIIHLFTLTN LGAPrAFKYFDTTIaRKeYrSTKEVLDATLIHQSITGLYETRIDLSQLGGDEGADKRTADGS EFESPKKKRK (SEQ ID NO: 1); and (ii) an adenosine deaminase domain.

[0015] In another aspect the invention features a guide RNA (gRNA) containing a nucleic acid sequence from among the following:

(SEQ ID NO: 2)
5′-GUUUUAGAGCUAGAAAUAGCAAGUUAAAAUAAGGCUAGUCCGUUAU
CAACUUGAAAAAGUGGCACCGAGUCGGUGCUUUU-3′;
(SEQ ID NO: 3)
5′-
ACCAUCGACAAGAAAGGGACUGAGUUUUAGAGCUAGAAAUAGCAAGUUA
AAAUAAGGCUAGUCCGUUAUCAACUUGAAAAAGUGGCACCGAGUCGGUG
CUUUU-3′;
(SEQ ID NO: 4)
5′-CCAUCGACAAGAAAGGGACUGAGUUUUAGAGCUAGAAAUAGCAAGU
UAAAAUAAGGCUAGUCCGUUAUCAACUUGAAAAAGUGGCACCGAGUCGG
UGCUUUU-3′;
(SEQ ID NO: 5)
5′-CAUCGACAAGAAAGGGACUGAGUUUUAGAGCUAGAAAUAGCAAGUU
AAAAUAAGGCUAGUCCGUUAUCAACUUGAAAAAGUGGCACCGAGUCGGU
GCUUUU-3′;
(SEQ ID NO: 6)
5′-AUCGACAAGAAAGGGACUGAGUUUUAGAGCUAGAAAUAGCAAGUUA
AAAUAAGGCUAGUCCGUUAUCAACUUGAAAAAGUGGCACCGAGUCGGUG
CUUUU-3′;
(SEQ ID NO: 7)
5′-UCGACAAGAAAGGGACUGAGUUUUAGAGCUAGAAAUAGCAAGUUAA
AAUAAGGCUAGUCCGUUAUCAACUUGAAAAAGUGGCACCGAGUCGGUGC
UUUU-3′;
and
(SEQ ID NO: 8)
5′-CGACAAGAAAGGGACUGAGUUUUAGAGCUAGAAAUAGCAAGUUAAA
AUAAGGCUAGUCCGUUAUCAACUUGAAAAAGUGGCACCGAGUCGGUGCU
UUU-3′.

[0016] In another aspect, the invention features a protein nucleic acid complex containing the base editor and a guide RNA of any of the foregoing aspects or embodiments delineated herein.

[0017] In various embodiments of the above aspects or any other aspect of the invention delineated herein, the A⋅T to G⋅C alteration at the SNP associated with A1AD changes a lysine to a glutamic acid in the A1AT polypeptide. In various embodiments of the above aspects or any other aspect of the invention delineated herein, the SNP associated with A1AD results in expression of an A1AT polypeptide having a lysine at amino acid position 342. In another embodiment, the base editor correction replaces the lysine at position 342 of an A1AT polypeptide associated with A1AD with a glutamic acid. In various embodiments of the above aspects or any other aspect of the invention delineated herein, the polynucleotide programmable DNA binding domain is a modified Streptococcus pyogenes Cas9 (SpCas9), or variants thereof.

[0018] In various embodiments of the above aspects or any other aspect of the invention delineated herein, the polynucleotide programmable DNA binding domain contains a modified SpCas9 having an altered protospacer-adjacent motif (PAM) specificity. In various embodiments of the above aspects or any other aspect of the invention delineated herein, the modified SpCas9 has specificity for the nucleic acid sequence 5′-AGC-3′. In various embodiments of the above aspects or any other aspect of the invention delineated herein, the modified SpCas9 comprises the amino acid substitution D1332A and one or more of D1135M, S1136Q, G1218K, E1219F, D1332A, R1335E, and T1337R, or corresponding amino acid substitutions thereof. In various embodiments of the above aspects or any other aspect of the invention delineated herein, the polynucleotide programmable DNA binding domain contains a variant of SpCas9 having an altered protospacer-adjacent motif (PAM) specificity. In various embodiments of the above aspects or any other aspect of the invention delineated herein, the variant of SpCas9 has specificity for the nucleic acid sequence 5′-NGC-3′. In various embodiments of the above aspects or any other aspect of the invention delineated herein, the modified SpCas9 contains amino acid substitutions D1135M, S1136Q, G1218K, E1219F, A1322R, D1332A, R1335E, and T1337R, or corresponding amino acid substitutions thereof. In various embodiments of the above aspects or any other aspect of the invention delineated herein, the polynucleotide programmable DNA binding domain is a nuclease inactive or nickase variant. In various embodiments of the above aspects or any other aspect of the invention delineated herein, the nickase variant contains an amino acid substitution D10A or a corresponding amino acid substitution thereof. In various embodiments of the above aspects or any other aspect of the invention delineated herein, the adenosine deaminase domain is capable of deaminating adenosine in deoxyribonucleic acid (DNA). In various embodiments of the above aspects or any other aspect of the invention delineated herein, the adenosine deaminase is a modified adenosine deaminase that does not occur in nature. In various embodiments of the above aspects or any other aspect of the invention delineated herein, the adenosine deaminase is a TadA deaminase (e.g., TadA*7.10). In various embodiments of the above aspects or any other aspect of the invention delineated herein, the one or more guide RNAs contains a CRISPR RNA (crRNA) and a trans-encoded small RNA (tracrRNA), where the crRNA contains a nucleic acid sequence complementary to a SERPINA1 nucleic acid sequence containing the SNP associated with A1AD. In various embodiments of the above aspects, the base editor is in complex with a single guide RNA (sgRNA) containing a nucleic acid sequence complementary to an SERPINA1 nucleic acid sequence containing the SNP associated with A1AD.

[0019] In yet another aspect, provided herein is a base editor system for correcting a pathogenic single nucleotide polymorphism (SNP) in a gene, wherein the base editor system comprises (a) a base editor comprising: (i) a polynucleotide-programmable DNA-binding domain, and (ii) a deaminase domain capable of deaminating the pathogenic SNP or its complement nucleobase; and (b) a guide polynucleotide in conjunction with the polynucleotide-programmable DNA-binding domain, wherein the guide polynucleotide targets the base editor to a target polynucleotide sequence at least a portion of which is located in the gene or its reverse complement; wherein deaminating the pathogenic SNP or its complement nucleobase results in a conversion of the pathogenic SNP to its wild-type allele, thereby correcting a pathogenic mutation, such as those listed in Tables 3A and 3B herein.

[0020] In another aspect, provided herein is a method for correcting a pathogenic single nucleotide polymorphism (SNP) in a gene, in which the method comprises: contacting a target nucleotide sequence, at least a portion of which is located in the gene or its reverse complement, with a base editor comprising: (i) a polynucleotide-programmable DNA-binding domain in conjunction with a guide polynucleotide that targets the base editor to the target polynucleotide sequence, at least a portion of which is located in the gene or its reverse complement, and (ii) a deaminase domain capable of deaminating the pathogenic SNP or its complement nucleobase; and editing the pathogenic SNP by deaminating the pathogenic SNP or its complement nucleobase upon targeting of the base editor to the target nucleotide sequence, wherein deaminating the pathogenic SNP or its complement nucleobase results in a conversion of the pathogenic SNP to its wild-type allele, thereby correcting a pathogenic mutation, such as listed in Table 3A or Table 3B herein.

[0021] In another aspect, provided herein is a method of treating a genetic disorder in a subject by correcting a pathogenic single nucleotide polymorphism (SNP) in a gene, in which the method comprises administering a base editor, or a polynucleotide encoding the base editor, to a subject in need thereof, wherein the base editor comprises: (i) a polynucleotide-programmable DNA-binding domain, and (ii) a deaminase domain capable of deaminating the pathogenic SNP or its complement nucleobase; and administering a guide polynucleotide to the subject, wherein the guide polynucleotide targets the base editor to a target nucleotide sequence, at least a portion of which is located in the gene or its reverse complement; and editing the pathogenic SNP by deaminating the pathogenic SNP or its complement nucleobase upon targeting of the base editor to the target nucleotide sequence, wherein deaminating the pathogenic SNP or its complement nucleobase results in a conversion of the pathogenic SNP to its wild-type allele, thereby correcting a pathogenic mutation, such as listed in Table 3A or 3B, and treating the genetic disorder.

[0022] Provided herein is a method of producing a cell, tissue, or organ for treating a genetic disorder in a subject in need thereof by correcting a pathogenic single nucleotide polymorphism (SNP) in a gene of the cell, tissue, or organ, in which the method comprises: contacting the cell, tissue, or organ with a base editor, wherein the base editor comprises: (i) a polynucleotide-programmable DNA-binding domain, and (ii) a deaminase domain capable of deaminating the pathogenic SNP or its complement nucleobase; and contacting the cell, tissue, or organ with a guide polynucleotide, wherein the guide polynucleotide targets the base editor to a target nucleotide sequence at least a portion of which is located in the gene or its reverse complement; and editing the pathogenic SNP by deaminating the pathogenic SNP or its complement nucleobase upon targeting of the base editor to the target nucleotide sequence, wherein deaminating the pathogenic SNP or its complement nucleobase results in a conversion of the pathogenic SNP to its wild-type allele, thereby correcting a pathogenic mutation, such as listed in Table 3A or 3B, and producing the cell, tissue, or organ for treating the genetic disorder. In some embodiments, the method further comprises administering the cell, tissue, or organ to the subject. In some embodiments, the cell, tissue, or organ is autologous to subject. In some embodiments, the cell, tissue, or organ is allogeneic to the subject. In some embodiments, the cell, tissue, or organ is xenogeneic to the subject

[0023] In some embodiments, the pathogenic SNP is associated with Stargardt disease; optionally, the pathogenic SNP is in an ABCA4 gene; and optionally, the pathogenic mutation comprises A1038V, L541P, G1961E, or a combination thereof. In some embodiments, the pathogenic SNP is associated with pseudoxanthoma elasticum; optionally, the pathogenic SNP is in an ABCC6 gene; and optionally, the pathogenic mutation comprises R1141*. In some embodiments, the pathogenic SNP is associated with medium-chain acyl-CoA dehydrogenase deficiency; optionally, the pathogenic SNP is in an ACADM gene; and optionally, the pathogenic mutation comprises K329E. In some embodiments, the pathogenic SNP is associated with severe combined immunodeficiency; optionally, the pathogenic SNP is in an ADA gene; and optionally, the pathogenic mutation comprises G216R, Q3*, or a combination thereof.

[0024] In some embodiments, the pathogenic SNP is associated with primary hypoxaluria; optionally, the pathogenic SNP is in an AGXT gene; and optionally, the pathogenic mutation comprises G170R. In some embodiments, the pathogenic SNP is associated with autosomal recessive hypercholesterolemia; optionally; optionally, the pathogenic SNP is in an ARH gene; optionally, the pathogenic mutation comprises Q136*. In some embodiments, the pathogenic SNP is associated with metachromatic leukodystrophy; optionally, the pathogenic SNP is in an ARSA gene; optionally, the pathogenic mutation comprises P426L, c. 459+1G>A, or a combination thereof. In some embodiments, the pathogenic SNP is associated with Marteauz-Lamy Syndrome (MSPVI); optionally, the pathogenic SNP is in an ARSB gene; optionally, the pathogenic mutation comprises Y210C. In some embodiments, the pathogenic SNP is associated with Citrullinemia Type I; optionally, the pathogenic SNP is in an ASS gene; optionally, the pathogenic mutation comprises G390R. In some embodiments, the pathogenic SNP is associated with Darier disease; optionally, the pathogenic SNP is in an ATP2A2 gene; optionally, the pathogenic mutation comprises N767S.

[0025] In some embodiments, the pathogenic SNP is associated with classic homocysteinuria; optionally, the pathogenic SNP is in a CBS gene; optionally, the pathogenic mutation comprises G307S, T191M, or a combination thereof. In some embodiments, the pathogenic SNP is associated with cystic fibrosis; optionally, the pathogenic SNP is in a CFTR gene; optionally, the pathogenic mutation comprises G551D, W1282*, R553*, R117H, or a combination thereof. In some embodiments, the pathogenic SNP is associated with choroideremia; optionally, the pathogenic SNP is in a CHM gene; optionally, the pathogenic mutation comprises R293*, R270*, A117A, or a combination thereof. In some embodiments, the pathogenic SNP is associated with Neuronal ceroid lipofuscinosis (NCL); optionally, the pathogenic SNP is in a CLN2 gene; optionally, the pathogenic mutation comprises R208*. In some embodiments, the pathogenic SNP is associated with autosomal dominant deafness; optionally, the pathogenic SNP is in a COCH gene; optionally, the pathogenic mutation comprises G88E. In some embodiments, the pathogenic SNP is associated with carnitine palmitoyltransferase II deficiency; optionally, the pathogenic SNP is in a CPT2 gene; optionally, the pathogenic mutation comprises S113L.

[0026] In some embodiments, the pathogenic SNP is associated with cystinosis; optionally, the pathogenic SNP is in a CTNS gene; optionally, the pathogenic mutation comprises W138*. In some embodiments, the pathogenic SNP is associated with autosomal recessive deafness; optionally, the pathogenic SNP is in a CX30 gene; optionally, the pathogenic mutation comprises TSM. In some embodiments, the pathogenic SNP is associated with autosomal recessive deafness; optionally, the pathogenic SNP is in an DFNB59 gene; and optionally, the pathogenic mutation comprises R183W. In some embodiments, the pathogenic SNP is associated with isolated agammaglobulinemia; optionally, the pathogenic SNP is in an E47 gene; and optionally, the pathogenic mutation comprises E555K. In some embodiments, the pathogenic SNP is associated with congenital factor XI deficiency; optionally, the pathogenic SNP is in an F11 gene; and optionally, the pathogenic mutation comprises E117*, F283L, or a combination thereof. In some embodiments, the pathogenic SNP is associated with congenital factor V deficiency; optionally, the pathogenic SNP is in an F5 gene; and optionally, the pathogenic mutation comprises R506Q, R534Q, or a combination thereof. In some embodiments, the pathogenic SNP is associated with congenital factor VII deficiency; optionally, the pathogenic SNP is in an F7 gene; and optionally, the pathogenic mutation comprises A294V, C310F, R304Q, Q100R, or a combination thereof.

[0027] In some embodiments, the pathogenic SNP is associated with hemophilia A; optionally, the pathogenic SNP is in an F8 gene; and optionally, the pathogenic mutation comprises R2169H, R1985Q, R2178C, R550C, or a combination thereof. In some embodiments, the pathogenic SNP is associated with hemophilia B; optionally, the pathogenic SNP is in an F9 gene; and optionally, the pathogenic mutation comprises T342M, R294Q, R43Q, R191H, G106S, A279T, R75*, R294*, R379Q, or a combination thereof. In some embodiments, the pathogenic SNP is associated with tyrosinemia type 1; optionally, the pathogenic SNP is in a FAH gene; and optionally, the pathogenic mutation comprises P261L. In some embodiments, the pathogenic SNP is associated with autosomal dominant hypophosphatemic rickets; optionally, the pathogenic SNP is in an FGF23 gene; and optionally, the pathogenic mutation comprises R176Q.

[0028] In some embodiments, the pathogenic SNP is associated with von Gierke disease; optionally, the pathogenic SNP is in a G6PC gene; and optionally, the pathogenic mutation comprises Q347*. In some embodiments, the pathogenic SNP is associated with Mediterranean G6PD deficiency; optionally, the pathogenic SNP is in a G6PD gene; and optionally, the pathogenic mutation comprises S188D. In some embodiments, the pathogenic SNP is associated with Morquio Syndrome (MPSIVA); optionally, the pathogenic SNP is in a GALNS gene; and optionally, the pathogenic mutation comprises R386C. In some embodiments, the pathogenic SNP is associated with classic galactosemia; optionally, the pathogenic SNP is in an GALT gene; and optionally, the pathogenic mutation comprises Q188R.

[0029] In some embodiments, the pathogenic SNP is associated with Gaucher disease; optionally, the pathogenic SNP is in an GBA gene; and optionally, the pathogenic mutation comprises N370S, L444P, or a combination thereof. In some embodiments, the pathogenic SNP is associated with glutaryl-CoA dehydrogenase deficiency; optionally, the pathogenic SNP is in a GCDH gene; and optionally, the pathogenic mutation comprises R138G, M263V, R402W, or a combination thereof. In some embodiments, the pathogenic SNP is associated with glycine encephalopathy; optionally, the pathogenic SNP is in a GLDC gene; and optionally, the pathogenic mutation comprises A389V, G771R, T269M, or a combination thereof. In some embodiments, the pathogenic SNP is associated with cone-rod dystrophy; optionally, the pathogenic SNP is in a GUCY2D gene; and optionally, the pathogenic mutation comprises R838C. In some embodiments, the pathogenic SNP is associated with Sly Syndrome (MPSVII); optionally, the pathogenic SNP is in a GUSB gene; and optionally, the pathogenic mutation comprises L175F.

[0030] In some embodiments, the pathogenic SNP is associated with sickle cell disease; optionally, the pathogenic SNP is in a HBB gene; and optionally, the pathogenic mutation comprises E26K; E7K; c.-138C>T; IVS2, 654 C>T; or a combination thereof. In some embodiments, the pathogenic SNP is associated with intermittent porphyria; optionally, the pathogenic SNP is in a HMBS gene; and optionally, the pathogenic mutation comprises R173W. In some embodiments, the pathogenic SNP is associated with Lesch-Nyhan syndrome; optionally, the pathogenic SNP is in a HPRT1 gene; and optionally, the pathogenic mutation comprises R51*, R170*, or a combination thereof. In some embodiments, the pathogenic SNP is associated with Hunter syndrome; optionally, the pathogenic SNP is in an IDS gene; and optionally, the pathogenic mutation comprises R88C, G374G, or a combination thereof. In some embodiments, the pathogenic SNP is associated with Hurler syndrome (MPS1); optionally, the pathogenic SNP is in an IDUA gene; and optionally, the pathogenic mutation comprises Q70*.

[0031] In some embodiments, the pathogenic SNP is associated with retinitis pigmentosa; optionally, the pathogenic SNP is in an IMPDH1 gene; and optionally, the pathogenic mutation comprises D226N. In some embodiments, the pathogenic SNP is associated with Andersen-Tawil syndrome; optionally, the pathogenic SNP is in a KCNJ2 gene; and optionally, the pathogenic mutation comprises R218W. In some embodiments, the pathogenic SNP is associated with Meesmann epithelial corneal dystrophy; optionally, the pathogenic SNP is in a KRT12 gene; and optionally, the pathogenic mutation comprises L132P. In some embodiments, the pathogenic SNP is associated with Parkinson's disease; optionally, the pathogenic SNP is in a LRRK2 gene; and optionally, the pathogenic mutation comprises G2109S. In some embodiments, the pathogenic SNP is associated with Rett syndrome; optionally, the pathogenic SNP is in a MECP2 gene; and optionally, the pathogenic mutation comprises R106W, R133C, R306C, R168*, R255*, or a combination thereof. In some embodiments, the pathogenic SNP is associated with Sanfilippo syndrome B (MPSIIIB); optionally, the pathogenic SNP is in a NAGLU gene; and optionally, the pathogenic mutation comprises R297*, Y140C, or a combination thereof.

[0032] In some embodiments, the pathogenic SNP is associated with CADASIL syndrome; optionally, the pathogenic SNP is in a NOTCH3 gene; and optionally, the pathogenic mutation comprises R90C, R141C, or a combination thereof. In some embodiments, the pathogenic SNP is associated with blue-cone monochromatism; optionally, the pathogenic SNP is in an OPN1LW gene; and optionally, the pathogenic mutation comprises C203R. In some embodiments, the pathogenic SNP is associated with phenylketonuria; optionally, the pathogenic SNP is in a PAH gene; and optionally, the pathogenic mutation comprises R408W, I65T, R261Q, IVS10-11G>A, or a combination thereof. In some embodiments, the pathogenic SNP is associated with Usher syndrome type 1F; optionally, the pathogenic SNP is in a PCDH15 gene; and optionally, the pathogenic mutation comprises R245*. In some embodiments, the pathogenic SNP is associated with retinitis pigmentosa; optionally, the pathogenic SNP is in a PDE6A gene; and optionally, the pathogenic mutation comprises V685M, D670G, or a combination thereof.

[0033] In some embodiments, the pathogenic SNP is associated with Pendred syndrome; optionally, the pathogenic SNP is in a PDS gene; and optionally, the pathogenic mutation comprises L236P; c.1001+1G>A; IVS8, +1 G>A, or a combination thereof. In some embodiments, the pathogenic SNP is associated with variegate porphyria; optionally, the pathogenic SNP is in a PPDX gene; and optionally, the pathogenic mutation comprises R59W. In some embodiments, the pathogenic SNP is associated with neuronal ceroid lipofuscinosis 1; optionally, the pathogenic SNP is in a PPT1 gene; and optionally, the pathogenic mutation comprises R151*. In some embodiments, the pathogenic SNP is associated with Creutzfeldt-Jakob disease (CJD); optionally, the pathogenic SNP is in a PRNP gene; and optionally, the pathogenic mutation comprises M129V, P102L, D178N, or a combination thereof. In some embodiments, the pathogenic SNP is associated with retinitis pigmentosa; optionally, the pathogenic SNP is in a PRPF3 gene; and optionally, the pathogenic mutation comprises T494M. In some embodiments, the pathogenic SNP is associated with retinitis pigmentosa; optionally, the pathogenic SNP is in a PRPF8 gene; and optionally, the pathogenic mutation comprises H2309R.

[0034] In some embodiments, the pathogenic SNP is associated with hereditary chronic pancreatitis; optionally, the pathogenic SNP is in a PRSS1 gene; and optionally, the pathogenic mutation comprises R122H. In some embodiments, the pathogenic SNP is associated with retinitis pigmentosa; optionally, the pathogenic SNP is in a RHO gene; and optionally, the pathogenic mutation comprises P347L, D190N, or a combination thereof. In some embodiments, the pathogenic SNP is associated with retinitis pigmentosa; optionally, the pathogenic SNP is in a RP1 gene; and optionally, the pathogenic mutation comprises R667*. In some embodiments, the pathogenic SNP is associated with Leber congenital amaurosis 2; optionally, the pathogenic SNP is in a RPE65 gene; and optionally, the pathogenic mutation comprises R44*; IVS1, G-A, +5; or a combination thereof. In some embodiments, the pathogenic SNP is associated with Blackfan-Diamond anemia; optionally, the pathogenic SNP is in a RPS19 gene; and optionally, the pathogenic mutation comprises R62Q.

[0035] In some embodiments, the pathogenic SNP is associated with X-linked retinoschisis; optionally, the pathogenic SNP is in a retinoschisin (RS1) gene; and optionally, the pathogenic mutation comprises R102W, R141C, or a combination thereof. In some embodiments, the pathogenic SNP is associated with A1AD; optionally, the pathogenic SNP is in a SERPINA1 gene; and optionally, the pathogenic mutation comprises E342K, R48C (R79C), or a combination thereof. In some embodiments, the pathogenic SNP is associated with Sanfilippo syndrome A (MPSIIIA); optionally, the pathogenic SNP is in a SGSH gene; and optionally, the pathogenic mutation comprises R74C. In some embodiments, the pathogenic SNP is associated with Neimann-Pick disease type A; optionally, the pathogenic SNP is in a SMPD1 gene; and optionally, the pathogenic mutation comprises L302P.

[0036] In some embodiments, the pathogenic SNP is associated with autosomal dominant Parkinson's disease; optionally, the pathogenic SNP is in a SNCA gene; and optionally, the pathogenic mutation comprises A53T. In some embodiments, the pathogenic SNP is associated with familial amyotrophic lateral sclerosis (ALS); optionally, the pathogenic SNP is in a superoxide dismutase 1 (SOD1) gene; and optionally, the pathogenic mutation comprises A4V, H46R, G37R, or a combination thereof. In some embodiments, the pathogenic SNP is associated with autosomal dominant deafness; optionally, the pathogenic SNP is in a TECTA gene; and optionally, the pathogenic mutation comprises Y1870C. In some embodiments, the pathogenic SNP is associated with autosomal recessive deafness; optionally, the pathogenic SNP is in a TMC1 gene; and optionally, the pathogenic mutation comprises Y182C. In some embodiments, the pathogenic SNP is associated with ATTR amyloidosis; optionally, the pathogenic SNP is in a TTR gene; and optionally, the pathogenic mutation comprises V50M/V30M. In some embodiments, the pathogenic SNP is associated with retinitis pigmentosa/Usher syndrome type 1C; optionally, the pathogenic SNP is in an USH1C gene; and optionally, the pathogenic mutation comprises V72V.

[0037] In some embodiments, the pathogenic SNP is associated with retinitis pigmentosa; optionally, the pathogenic SNP is in an USH2a gene; and optionally, the pathogenic mutation comprises C759F. In some embodiments, the pathogenic SNP is associated with myotubular myopathy; optionally, the pathogenic SNP is in a MTM1 gene; and optionally, the pathogenic mutation comprises c.1261-10A>G.

[0038] In some embodiments, any of the base editor system or the methods provided herein can further comprise a second guide polynucleotide for editing of an additional nucleobase. In some embodiments, the additional nucleobase is not located in the gene. In some embodiments, the additional nucleobase is located in the gene. In some embodiments, additional nucleobase is located in a protein coding region. In some embodiments, the additional nucleobase is located in a protein non-coding region. In some embodiments, the protein non-coding region is a gene regulatory element. In some embodiments, the deaminase domain is a cytidine deaminase domain or an adenosine deaminase domain. In some embodiments, the deaminase domain is a cytidine deaminase domain. In some embodiments, the deaminase domain is an adenosine deaminase domain. In some embodiments, the adenosine deaminase domain is capable of deaminating adenosine in deoxyribonucleic acid (DNA). In some embodiments, the guide polynucleotide comprises ribonucleic acid (RNA), or deoxyribonucleic acid (DNA). In some embodiments, the guide polynucleotide comprises a CRISPR RNA (crRNA) sequence, a trans-activating CRISPR RNA (tracrRNA) sequence, or a combination thereof.

[0039] In some embodiments, any of the base editor system or the methods provided herein can further comprise a second guide polynucleotide. In some embodiments, the second guide polynucleotide comprises ribonucleic acid (RNA), or deoxyribonucleic acid (DNA). In some embodiments, the second guide polynucleotide comprises a CRISPR RNA (crRNA) sequence, a trans-activating CRISPR RNA (tracrRNA) sequence, or a combination thereof. In some embodiments, the second guide polynucleotide targets the base editor to a second target nucleotide sequence.

[0040] In some embodiments, in any of the base editor system or the methods provided herein, the polynucleotide-programmable DNA-binding domain comprises a Cas9 domain, a Cpf1 domain, a CasX domain, a CasY domain, a Cas12b/C2c1 domain or a Cas12c/C2c3 domain. In some embodiments, the polynucleotide-programmable DNA-binding domain is nuclease dead. In some embodiments, the polynucleotide-programmable DNA-binding domain is a nickase. In some embodiments, the polynucleotide-programmable DNA-binding domain comprises a Cas9 domain. In some embodiments, the Cas9 domain comprises a nuclease dead Cas9 (dCas9), a Cas9 nickase (nCas9), or a nuclease active Cas9. In some embodiments, the Cas9 domain comprises a Cas9 nickase. In some embodiments, the polynucleotide-programmable DNA-binding domain is an engineered or a modified polynucleotide-programmable DNA-binding domain.

[0041] In some embodiments, any of the base editor system or the methods provided herein can further comprise a second base editor. In some embodiments, the second base editor comprises a different deaminase domain than the base editor.

[0042] In some embodiments, in any of the methods provided herein, the editing results in less than 20% indel formation. In some embodiments, the editing results in less than 15% indel formation. In some embodiments, the editing results in less than 10% indel formation. In some embodiments, the editing results in less than 5% indel formation. In some embodiments, the editing results in less than 4% indel formation. In some embodiments, the editing results in less than 3% indel formation. In some embodiments, the editing results in less than 2% indel formation. In some embodiments, the editing results in less than 1% indel formation. In some embodiments, the editing results in less than 0.5% indel formation. In some embodiments, the editing results in less than 0.1% indel formation. In some embodiments, the editing does not result in translocations.

[0043] In one aspect, the invention provides a method of editing a G6PC polynucleotide comprising a single nucleotide polymorphism (SNP) associated with glycogen storage disorder Type 1a (GSD1a), the method comprising contacting the G6PC polynucleotide with a base editor in complex with one or more guide polynucleotides, wherein the base editor comprises a polynucleotide programmable DNA binding domain and an adenosine deaminase domain, and wherein one or more of the guide polynucleotides target the base editor to effect an A⋅T to G⋅C alteration of the SNP associated with GSD1a. In one embodiment, the A⋅T to G⋅C alteration at the SNP associated with glycogen storage disorder Type 1a (GSD1a) changes a glutamine (Q) to a non-glutamine (X) amino acid. In various embodiments of the above aspects or any other aspect of the invention delineated herein, the A⋅T to G⋅C alteration at the SNP associated with glycogen storage disorder Type 1a (GSD1a) changes an arginine (R) to a non-arginine (X) in the G6PC polypeptide.

[0044] In various embodiments of the above aspects or any other aspect of the invention delineated herein, the SNP associated with GSD1a results in expression of an G6PC polypeptide having a non-glutamine (X) amino acid at position 347 or a non-arginine (X) amino acid at position 83. In one embodiment, the base editor correction replaces the glutamine at position 347 with a non-glutamine amino acid (X). In another embodiment, the base editor correction replaces the arginine at position 83 with a non-arginine amino acid (X).

[0045] In various embodiments of the above aspects or any other aspect of the invention delineated herein, the polynucleotide programmable DNA binding domain is a modified Streptococcus pyogenes Cas9 (SpCas9), or variants thereof. In various embodiments of the above aspects or any other aspect of the invention delineated herein, the polynucleotide programmable DNA binding domain comprises a modified SpCas9 having an altered protospacer-adjacent motif (PAM) specificity. In one embodiment, the modified SpCas9 has specificity for the nucleic acid sequences 5′-NGA-3′ or 5′-NGG-3′. In various embodiments of the above aspects or any other aspect of the invention delineated herein, the adenosine deaminase is ABE7.10.

[0046] In one aspect, a cell is produced by introducing into the cell, or a progenitor thereof: a base editor, a polynucleotide encoding the base editor, to the cell, wherein the base editor comprises a polynucleotide programmable DNA binding domain and an adenosine deaminase domain; and one or more guide polynucleotides that target the base editor to effect an AT to GC alteration of the SNP associated with glycogen storage disorder Type 1a (GSD1a). In various embodiments of the above aspects or any other aspect of the invention delineated herein, the cell is a hepatocyte, a hepatocyte precursor, or an iPSc-derived hepatocyte.

[0047] In various embodiments of the above aspects or any other aspect of the invention delineated herein, the cell is from a subject having GSD1a. In various embodiments of the above aspects or any other aspect of the invention delineated herein, the cell harbors a Q347X mutation. In various embodiments of the above aspects or any other aspect of the invention delineated herein, the A⋅T to G⋅C alteration at the SNP associated with GSD1a changes a glutamine to a non-glutamine (X) amino acid. In various embodiments of the above aspects or any other aspect of the invention delineated herein, the A⋅T to G⋅C alteration at the SNP associated with GSD1a changes an arginine to a non-arginine (X) amino acid in the G6PC polypeptide. In various embodiments of the above aspects or any other aspect of the invention delineated herein, the SNP associated with GSD1a results in expression of an G6PC polypeptide having a non-glutamine (X) amino acid at position 347 or a non-arginine (X) amino acid at position 83.

[0048] In one aspect, the invention provides a method of treating glycogen storage disorder Type 1a (GSD1a) or von Gierke Disease in a subject in need thereof, the method comprising administering to the subject the cell of various embodiments of the above aspects or any other aspect of the invention delineated herein.

[0049] In another aspect, the invention provides a method of producing a hepatocyte, or progenitor thereof, the method comprising: (a) introducing into an induced pluripotent stem cell or hepatocyte progenitor comprising an SNP associated with GSD1a, a base editor, or a polynucleotide encoding the base editor, wherein the base editor comprises a polynucleotide-programmable nucleotide-binding domain and an adenosine deaminase domain; and one or more guide polynucleotides, wherein the one or more guide polynucleotides target the base editor to effect an A⋅T to G⋅C alteration of the SNP associated with GSD1a; and (b) differentiating the induced pluripotent stem cell or hepatocyte progenitor into hepatocyte. In a further aspect, the method includes differentiating the induced pluripotent stem cell into a hepatocyte or progenitor thereof. In various embodiments, the induced pluripotent stem cell of step (a) comprises a Q347X mutation.

[0050] In various embodiments of the above aspects or any other aspect of the invention delineated herein, the hepatocyte progenitor is obtained from a subject having GSD1a. In various embodiments, the hepatocyte or hepatocyte progenitor is a mammalian cell or human cell. In various embodiments of the above aspects or any other aspect of the invention delineated herein, the A⋅T to G⋅C alteration at the SNP associated with GSD1a changes a glutamine to a non-glutamine (X) amino acid or changes an arginine to a non-arginine (X) amino acid in the G6PC polypeptide. In various embodiments, the SNP associated with GSD1a results in expression of an G6PC polypeptide having a non-glutamine (X) amino acid at position 347. In various embodiments, the SNP associated with GSD1a results in expression of an G6PC polypeptide having a non-arginine (X) amino acid at position 83. In various embodiments, the SNP associated with GSD1a substitutes a glutamine with a non-glutamine (X) amino acid. In various embodiments, the SNP associated with GSD1a substitutes an arginine with a non-arginine (X) amino acid. In various embodiments of the above aspects or any other aspect of the invention delineated herein, the cell is selected for the A⋅T to G⋅C alteration of the SNP associated with GSD1a.

[0051] In one aspect, the invention provides a method of editing a IDUA polynucleotide comprising a single nucleotide polymorphism (SNP) associated with mucopolysaccharidosis type 1 (MPS1), the method comprising contacting the IDUA polynucleotide with a base editor in complex with one or more guide polynucleotides, wherein the base editor comprises a polynucleotide programmable DNA binding domain and an adenosine deaminase domain, and wherein one or more of the guide polynucleotides target the base editor to effect an A⋅T to G⋅C alteration of the SNP associated with MPS1. In one embodiment, the polynucleotide programmable DNA binding domain is a modified Streptococcus pyogenes Cas9 (SpCas9), or variants thereof. In a further embodiment, the polynucleotide programmable DNA binding domain comprises a modified SpCas9 having an altered protospacer-adjacent motif (PAM) specificity. In various embodiments of the above aspects or any other aspect of the invention delineated herein, the modified SpCas9 has specificity for the nucleic acid sequence 5′-NGG-3′. In various embodiments of the above aspects or any other aspect of the invention delineated herein, the adenosine deaminase is ABE7.10. In various embodiments, the guide polynucleotide comprises the human nucleic acid sequence ACTCTaGGCAGAGGTCTCAA AGG (SEQ ID NO: 9). In various embodiments, the guide polynucleotide comprises the mouse nucleic acid sequence GCTCTaGGCCGAAGTGTCGC AGG (SEQ ID NO: 10).

[0052] In one aspect, a cell is produced by introducing into the cell, or a progenitor thereof: a base editor, a polynucleotide encoding the base editor, to the cell, wherein the base editor comprises a polynucleotide programmable DNA binding domain and an adenosine deaminase domain; and one or more guide polynucleotides that target the base editor to effect an AT to GC alteration of the SNP associated with mucopolysaccharidosis type 1 (MPS1). In various embodiments, the cell is a stem cell, a stem cell precursor, or an induced pluripotent stem cell (iPSC). In various embodiments of the above aspects or any other aspect of the invention delineated herein, the cell is from a subject having MPS1.

[0053] In another aspect, the invention provides a method of treating MPS1 in a subject in need thereof, the method comprising administering to the subject a cell of the above aspects or any other aspect of the invention delineated herein.

### BRIEF DESCRIPTION OF THE DRAWINGS

[0054] The features of the present disclosure are set forth with particularity in the appended claims. A better understanding of the features and advantages of the present will be obtained by reference to the following detailed description that sets forth illustrative embodiments, in which the principles of the disclosure are utilized, and the accompanying drawings of which:

[0055] FIG. 1 is schematic diagram comparing a healthy subject and a patient with antitrypsin deficiency (A1AD). In the healthy subject, alpha-1 antitrypsin (A1AT) protects lung from protease damage, and the liver releases alpha-1 antitrypsin into the blood. In a patient having A1AD, the deficiency of normally functioning A1AT protein leads to lung tissue damage. In addition, an accumulation of abnormal A1AT in hepatocytes leads to cirrhosis of the liver.

[0056] FIG. 2 shows typical ranges of serum alpha-1 antitrypsin (A1AT) levels for different genotypes (normal (MM); heterozygous carriers of alpha-1 antitrypsin deficiency (MZ, SZ); and homozygous deficiency (SS, ZZ)). Serum alpha-1 antitrypsin (AAT) concentration is expressed in μM in the left “y” axis, which is common in the literature. The right “y” axis shows an approximate conversion of serum AAT concentration into mg/dL units, as commonly reported by clinical laboratories and by different measurement technologies (nephelometry or radial immunodiffusion)

[0057] FIGS. 3A-3C present a base editing target sequence, and graphs related to precise corrections of pathogenic mutations in the SERPINA1 gene which encodes the A1AT protein. FIG. 3A shows a precise correction base editing strategy for a mutation in the SERPINA1 gene which encodes A1AT. A7 (“Target A”) can be edited to restore wild-type (WT) phenotype. In some cases, “A” nucleobases A5/A7 can be edited to introduce amino acid D341G into the A1AT protein. In some cases, A7/A8 can be edited to introduce amino acid E342G into the A1AT protein. FIG. 3A discloses SEQ ID NOS 309-310, respectively, in order of appearance. FIG. 3B provides a nucleic acid sequence showing the position of target A nucleobases within the SERPINA1 gene and the encoded amino acids, as well as a graph showing levels of A1AT (ng/ml) secreted from HEK293T cells that express wild-type (WT), or A1AT variants containing E342K, D341G, or E342G. FIG. 3B discloses SEQ ID NOS 309-310, respectively, in order of appearance. FIG. 3C is a graph showing elastase activity in wild-type (WT) A1AT protein versus that in A1AT variants containing E342K or D341G.

[0058] FIG. 4 is a schematic diagram showing a strategy to evolve a DNA deoxyadenosine deaminase starting from TadA tRNA deaminase. Shown are a library of E. coli harboring a plasmid library of mutant ecTadA (TadA*) genes fused to dCas9 and a selection plasmid requiring targeted A⋅T to G⋅C mutations to repair antibiotic resistance genes. Mutations from surviving TadA* variants were imported into an ABE architecture for base editing in human cells.

[0059] FIG. 5 provides a nucleic acid sequence showing the position of target “A” nucleobases within the SERPINA1 gene and the encoded amino acids, as well as a graph showing percent editing at positions A5 or A7 in the SERPINA1 gene as a function of guide RNA length. FIG. 5 discloses SEQ ID NOS 309-310, respectively, in order of appearance.

[0060] FIGS. 6A and 6B depict a library of SpCas9 mutants that were generated to enrich for mutations within the PAM-interacting (PI) domain of Cas9. This library can be screened for SpCas9s having altered PAM specificities.

[0061] FIG. 7 is a schematic diagram showing a strategy for the correction of the Q347X mutation using a base editor to convert A>G at the targeted site (highlighted) using NGG and NGA PAM recognition sequences. A precise correction would yield the coversion TAG>CAG (stop codon>Glutamine). FIG. 7 discloses SEQ ID NOS 311-312, respectively, in order of appearance.

[0062] FIGS. 8A and 8B provide a transfection schedule based on the maturation cycle for GSD1a iPSc-derived hepatocytes. FIG. 8A provides a timeline of the transfection schedule showing representative time points for plating, transfection, and cell harvest. FIG. 8B shows images of maturing GSD1a iPSc-derived hepatocytes on Day 5 and Day 7.

[0063] FIGS. 9A and 9B provide data showing base editing precise correction of G6PC Q347X for GSD1a. FIG. 9A provides nucleic acid sequences showing the positions of on target and bystander “A” nucleobases within the G6PC gene and corresponding NGG and NGA PAM sequences, as well as a graph showing the percentage of base editing efficiency of G6PC Q347X in HEK293T cells for ABE-On target, ABE-Bystander, Indels, and Nuclease-Indels using either NGA PAM or NGG PAM. FIG. 9A discloses SEQ ID NOS 313-314, respectively, in order of appearance. FIG. 9B provides a graph showing the base editing efficiency in G6PC Q347X in patient iPSc-derived hepatocytes for ABE-On target, ABE-Bystander, Indels, and Nuclease-Indels using either NGA PAM or NGG PAM. The solid line denotes mean of experiments.

[0064] FIG. 10 provides a nucleic acid sequence showing the positions of on target and bystander “A” nucleobases within the G6PC gene and corresponding GGA PAM sequence, as well as a graph showing the percent of A>G base editing of G6PC Q347X in patient iPSc-derived hepatocyes for ABE-On target, ABE-Bystander, and Indel using mRNA variants. FIG. 10 discloses SEQ ID NOS 314-315, respectively, in order of appearance.

[0065] FIG. 11 provides a graph showing the percent of base editing efficiency in the mouse and human IDUA gene using an ABE7.10 base editor.

### DETAILED DESCRIPTION OF THE DISCLOSURE

[0066] The description and examples herein illustrate embodiments of the present disclosure in detail. It is to be understood that this disclosure is not limited to the particular embodiments described herein and as such can vary. Those of skill in the art will recognize that there are numerous variations and modifications of this disclosure, which are encompassed within its scope.

[0067] All terms are intended to be understood as they would be understood by a person skilled in the art. Unless defined otherwise, all technical and scientific terms used herein have the same meaning as commonly understood by one of ordinary skill in the art to which the disclosure pertains.

[0068] The practice of some embodiments disclosed herein employ, unless otherwise indicated, conventional techniques of immunology, biochemistry, chemistry, molecular biology, microbiology, cell biology, genomics and recombinant DNA, which are within the skill of the art. See for example Sambrook and Green, Molecular Cloning: A Laboratory Manual, 4th Edition (2012); the series Current Protocols in Molecular Biology (F. M. Ausubel, et al. eds.); the series Methods In Enzymology (Academic Press, Inc.), PCR 2: A Practical Approach (M. J. MacPherson, B. D. Hames and G. R. Taylor eds. (1995)), Harlow and Lane, eds. (1988) Antibodies, A Laboratory Manual, and Culture of Animal Cells: A Manual of Basic Technique and Specialized Applications, 6th Edition (R. I. Freshney, ed. (2010)).

[0069] The section headings used herein are for organizational purposes only and are not to be construed as limiting the subject matter described.

[0070] Although various features of the present disclosure can be described in the context of a single embodiment, the features can also be provided separately or in any suitable combination. Conversely, although the present disclosure can be described herein in the context of separate embodiments for clarity, the present disclosure can also be implemented in a single embodiment.

### Definitions

[0071] The following definitions supplement those in the art and are directed to the current application and are not to be imputed to any related or unrelated case, e.g., to any commonly owned patent or application. Although any methods and materials similar or equivalent to those described herein can be used in the practice for testing of the present disclosure, the preferred materials and methods are described herein. Accordingly, the terminology used herein is for the purpose of describing particular embodiments only, and is not intended to be limiting.

[0072] Unless defined otherwise, all technical and scientific terms as used herein have the meaning commonly understood by a person skilled in the art to which this invention belongs. The following references provide one of skill with a general definition of many of the terms used in this invention: Singleton et al., Dictionary of Microbiology and Molecular Biology (2nd ed. 1994); The Cambridge Dictionary of Science and Technology (Walker ed., 1988); The Glossary of Genetics, 5th Ed., R. Rieger et al. (eds.), Springer Verlag (1991); and Hale & Marham, The Harper Collins Dictionary of Biology (1991).

[0073] In this application, the use of the singular includes the plural unless specifically stated otherwise. It must be noted that, as used in the specification, the singular forms “a,” “an” and “the” include plural referents unless the context clearly dictates otherwise. In this application, the use of “or” means “and/or” unless stated otherwise. Furthermore, use of the term “including” as well as other forms, such as “include”, “includes,” and “included,” is not limiting.

[0074] As used in this specification and claim(s), the words “comprising” (and any form of comprising, such as “comprise” and “comprises”), “having” (and any form of having, such as “have” and “has”), “including” (and any form of including, such as “includes” and “include”) or “containing” (and any form of containing, such as “contains” and “contain”) are inclusive or open-ended and do not exclude additional, unrecited elements or method steps. It is contemplated that any embodiment discussed in this specification can be implemented with respect to any method or composition of the present disclosure, and vice versa. Furthermore, compositions of the present disclosure can be used to achieve methods of the present disclosure.

[0075] The term “about” or “approximately” means within an acceptable error range for the particular value as determined by one of ordinary skill in the art, which will depend in part on how the value is measured or determined, i.e., the limitations of the measurement system. For example, “about” can mean within 1 or more than 1 standard deviation, per the practice in the art. Alternatively, “about” can mean a range of up to 20%, up to 10%, up to 5%, or up to 1% of a given value. Alternatively, particularly with respect to biological systems or processes, the term can mean within an order of magnitude, preferably within 5-fold, and more preferably within 2-fold, of a value. Where particular values are described in the application and claims, unless otherwise stated the term “about” meaning within an acceptable error range for the particular value should be assumed.

[0076] Reference in the specification to “some embodiments,” “an embodiment,” “one embodiment” or “other embodiments” means that a particular feature, structure, or characteristic described in connection with the embodiments is included in at least some embodiments, but not necessarily all embodiments, of the present disclosures.

[0077] By “adenosine deaminase” is meant a polypeptide or fragment thereof capable of catalyzing the hydrolytic deamination of adenine or adenosine. In some embodiments, the deaminase or deaminase domain is an adenosine deaminase catalyzing the hydrolytic deamination of adenosine to inosine or deoxy adenosine to deoxyinosine. In some embodiments, the adenosine deaminase catalyzes the hydrolytic deamination of adenine or adenosine in deoxyribonucleic acid (DNA). The adenosine deaminases (e.g. engineered adenosine deaminases, evolved adenosine deaminases) provided herein may be from any organism, such as a bacterium.

[0078] By “agent” is meant any small molecule chemical compound, antibody, nucleic acid molecule, or polypeptide, or fragments thereof.

[0079] By “ameliorate” is meant decrease, suppress, attenuate, diminish, arrest, or stabilize the development or progression of a disease.

[0080] By “alteration” is meant a change (increase or decrease) in the expression levels or activity of a gene or polypeptide as detected by standard art known methods such as those described herein. As used herein, an alteration includes a 10% change in expression levels, preferably a 25% change, more preferably a 40% change, and most preferably a 50% or greater change in expression levels.

[0081] By “analog” is meant a molecule that is not identical, but has analogous functional or structural features. For example, a polypeptide analog retains the biological activity of a corresponding naturally-occurring polypeptide, while having certain biochemical modifications that enhance the analog's function relative to a naturally occurring polypeptide. Such biochemical modifications could increase the analog's protease resistance, membrane permeability, or half-life, without altering, for example, ligand binding. An analog may include an unnatural amino acid.

[0082] “Administering” is referred to herein as providing one or more compositions described herein to a patient or a subject. By way of example and without limitation, composition administration, e.g., injection, can be performed by intravenous (i.v.) injection, sub-cutaneous (s.c.) injection, intradermal (i.d.) injection, intraperitoneal (i.p.) injection, or intramuscular (i.m.) injection. One or more such routes can be employed. Parenteral administration can be, for example, by bolus injection or by gradual perfusion over time. Alternatively, or concurrently, administration can be by an oral route.

[0083] By “alpha-1 antitrypsin (A1AT) protein” is meant a polypeptide or fragment thereof having at least about 95% amino acid sequence identity to the amino acid sequence of UniProt Accession No. P01009. In particular embodiments, an A1AT protein comprises one or more alterations relative to the following reference sequence. In one particular embodiment, an A1AT protein associated with A1AD comprises an E342K mutation. An exemplary A1AT amino acid sequence (>sp1P010091A1AT_HUMAN Alpha-1-antitrypsin OS=Homo sapiens OX=9606 GN=SERPINA1 PE=1 SV=3) is provided below:

(SEQ ID NO: 11)
MPSSVSWGILLLAGLCCLVPVSLAEDPQGDAAQKTDTSHHDQDHPTFNKI
TPNLAEFAFSLYRQLAHQSNSTNIFFSPVSIATAFAMLSLGTKADTHDEI
LEGLNFNLTEIPEAQIHEGFQELLRTLNQPDSQLQLTTGNGLFLSEGLKL
VDKFLEDVKKLYHSEAFTVNFGDTEEAKKQINDYVEKGTQGKIVDLVKEL
DRDTVFALVNYIFFKGKWERPFEVKDTEEEDFHVDQVTTVKVPMMKRLGM
FNIQHCKKLSSWVLLMKYLGNATAIFFLPDEGKLQHLENELTHDIITKFL
ENEDRRSASLHLPKLSITGTYDLKSVLGQLGITKVFSNGADLSGVTEEAP
LKLSKAVHKAVLTIDEKGTEAAGAMFLEAIPMSIPPEVKFNKPFVFLMIE
QNTKSPLFMGKVVNPTQK.

[0084] By “base editor (BE),” or “nucleobase editor (NBE)” is meant an agent that binds a polynucleotide and has nucleobase modifying activity. In various embodiments, the base editor comprises a nucleobase modifying polypeptide (e.g., a deaminase) and a polynucleotide programmable nucleotide binding domain in conjunction with a guide polynucleotide (e.g., guide RNA). In various embodiments, the agent is a biomolecular complex comprising a protein domain having base editing activity, i.e., a domain capable of modifying a base (e.g., A, T, C, G, or U) within a nucleic acid molecule (e.g., DNA). In some embodiments, the polynucleotide programmable DNA binding domain is fused or linked to a deaminase domain. In one embodiment, the agent is a fusion protein comprising a domain having base editing activity. In another embodiment, the protein domain having base editing activity is linked to the guide RNA (e.g., via an RNA binding motif on the guide RNA and an RNA binding domain fused to the deaminase). In some embodiments, the domain having base editing activity is capable of deaminating a base within a nucleic acid molecule. In some embodiments, the base editor is capable of deaminating a base within a DNA molecule. In some embodiments, the base editor is capable of deaminating a cytosine (C) or an adenosine (A) within DNA. In some embodiments, the base editor is a cytidine base editor (CBE). In some embodiments, the base editor is an adenosine base editor (ABE). In some embodiments, an adenosine deaminase is evolved from TadA. In some embodiments, the polynucleotide programmable DNA binding domain is a CRISPR associated (e.g., Cas or Cpf1) enzyme. In some embodiments, the base editor is a catalytically dead Cas9 (dCas9) fused to a deaminase domain. In some embodiments, the base editor is a Cas9 nickase (nCas9) fused to a deaminase domain. In some embodiments, the base editor is fused to an inhibitor of base excision repair (BER). In some embodiments, the inhibitor of base excision repair is a uracil DNA glycosylase inhibitor (UGI). In some embodiments, the inhibitor of base excision repair is an inosine base excision repair inhibitor. Details of base editors are described in International PCT Application Nos. PCT/2017/045381 (WO2018/027078) and PCT/US2016/058344 (WO2017/070632), each of which is incorporated herein by reference for its entirety. Also see Komor, A. C., et al., “Programmable editing of a target base in genomic DNA without double-stranded DNA cleavage” Nature 533, 420-424 (2016); Gaudelli, N. M., et al., “Programmable base editing of A⋅T to G⋅C in genomic DNA without DNA cleavage” Nature 551, 464-471 (2017); Komor, A. C., et al., “Improved base excision repair inhibition and bacteriophage Mu Gam protein yields C:G-to-T:A base editors with higher efficiency and product purity” Science Advances 3:eaao4774 (2017), and Rees, H. A., et al., “Base editing: precision chemistry on the genome and transcriptome of living cells.” Nat Rev Genet. 2018 December; 19(12):770-788. doi: 10.1038/s41576-018-0059-1, the entire contents of which are hereby incorporated by reference.

[0085] By way of example, the cytidine base editor CBE as used in the base editing compositions, systems and methods described herein has the following nucleic acid sequence (8877 base pairs), (Addgene, Watertown, Mass.; Komor A C, et al., 2017, Sci Adv., 30; 3(8):eaao4774. doi: 10.1126/sciadv.aao4774) as provided below. Polynucleotide sequences having at least 95% or greater identity to the BE4 nucleic acid sequence are also encompassed.

| (SEQ ID NO: 12) | |
|---|---|
| 1 | atatgccaag tacgccccct attgacgtca atgacggtaa atggcccgcc tggcattatg |
| 61 | cccagtacat gaccttatgg gactttccta cttggcagta catctacgta ttagtcatcg |
| 121 | ctattaccat ggtgatgcgg ttttggcagt acatcaatgg gcgtggatag cggtttgact |
| 181 | cacggggatt tccaagtctc caccccattg acgtcaatgg gagtttgttt tggcaccaaa |
| 241 | atcaacggga ctttccaaaa tgtcgtaaca actccgcccc attgacgcaa atgggcggta |
| 301 | ggcgtgtacg gtgggaggtc tatataagca gagctggttt agtgaaccgt cagatccgct |
| 361 | agagatccgc ggccgctaat acgactcact atagggagag ccgccaccat gagctcagag |
| 421 | actggcccag tggctgtgga ccccacattg agacggcgga tcgagcccca tgagtttgag |
| 481 | gtattcttcg atccgagaga gctccgcaag gagacctgcc tgctttacga aattaattgg |
| 541 | gggggccggc actccatttg gcgacataca tcacagaaca ctaacaagca cgtcgaagtc |
| 601 | aacttcatcg agaagttcac gacagaaaga tatttctgtc cgaacacaag gtgcagcatt |
| 661 | acctggtttc tcagctggag cccatgcggc gaatgtagta gggccatcac tgaattcctg |
| 721 | tcaaggtatc cccacgtcac tctgtttatt tacatcgcaa ggctgtacca ccacgctgac |
| 781 | ccccgcaatc gacaaggcct gcgggatttg atctcttcag gtgtgactat ccaaattatg |
| 841 | actgagcagg agtcaggata ctgctggaga aactttgtga attatagccc gagtaatgaa |
| 901 | gcccactggc ctaggtatcc ccatctgtgg gtacgactgt acgttcttga actgtactgc |
| 961 | atcatactgg gcctgcctcc ttgtctcaac attctgagaa ggaagcagcc acagctgaca |
| 1021 | ttctttacca tcgctcttca gtcttgtcat taccagcgac tgcccccaca cattctctgg |
| 1081 | gccaccgggt tgaaatctgg tggttcttct ggtggttcta gcggcagcga gactcccggg |
| 1141 | acctcagagt ccgccacacc cgaaagttct ggtggttctt ctggtggttc tgataaaaag |
| 1201 | tattctattg gtttagccat cggcactaat tccgttggat gggctgtcat aaccgatgaa |
| 1261 | tacaaagtac cttcaaagaa atttaaggtg ttggggaaca cagaccgtca ttcgattaaa |
| 1321 | aagaatctta tcggtgccct cctattcgat agtggcgaaa cggcagaggc gactcgcctg |
| 1381 | aaacgaaccg ctcggagaag gtatacacgt cgcaagaacc gaatatgtta cttacaagaa |
| 1441 | atttttagca atgagatggc caaagttgac gattctttct ttcaccgttt ggaagagtcc |
| 1501 | ttccttgtcg aagaggacaa gaaacatgaa cggcacccca tctttggaaa catagtagat |
| 1561 | gaggtggcat atcatgaaaa gtacccaacg atttatcacc tcagaaaaaa gctagttgac |
| 1621 | tcaactgata aagcggacct gaggttaatc tacttggctc ttgcccatat gataaagttc |
| 1681 | cgtgggcact ttctcattga gggtgatcta aatccggaca actcggatgt cgacaaactg |
| 1741 | ttcatccagt tagtacaaac ctataatcag ttgtttgaag agaaccctat aaatgcaagt |
| 1801 | ggcgtggatg cgaaggctat tcttagcgcc cgcctctcta aatcccgacg gctagaaaac |
| 1861 | ctgatcgcac aattacccgg agagaagaaa aatgggttgt tcggtaacct tatagcgctc |
| 1921 | tcactaggcc tgacaccaaa ttttaagtcg aacttcgact tagctgaaga tgccaaattg |
| 1981 | cagcttagta aggacacgta cgatgacgat ctcgacaatc tactggcaca aattggagat |
| 2041 | cagtatgcgg acttattttt ggctgccaaa aaccttagcg atgcaatcct cctatctgac |
| 2101 | atactgagag ttaatactga gattaccaag gcgccgttat ccgcttcaat gatcaaaagg |
| 2161 | tacgatgaac atcaccaaga cttgacactt ctcaaggccc tagtccgtca gcaactgcct |
| 2221 | gagaaatata aggaaatatt ctttgatcag tcgaaaaacg ggtacgcagg ttatattgac |
| 2281 | ggcggagcga gtcaagagga attctacaag tttatcaaac ccatattaga gaagatggat |
| 2341 | gggacggaag agttgcttgt aaaactcaat cgcgaagatc tactgcgaaa gcagcggact |
| 2401 | ttcgacaacg gtagcattcc acatcaaatc cacttaggcg aattgcatgc tatacttaga |
| 2461 | aggcaggagg atttttatcc gttcctcaaa gacaatcgtg aaaagattga gaaaatccta |
| 2521 | acctttcgca taccttacta tgtgggaccc ctggcccgag ggaactctcg gttcgcatgg |
| 2581 | atgacaagaa agtccgaaga aacgattact ccatggaatt ttgaggaagt tgtcgataaa |
| 2641 | ggtgcgtcag ctcaatcgtt catcgagagg atgaccaact ttgacaagaa tttaccgaac |
| 2701 | gaaaaagtat tgcctaagca cagtttactt tacgagtatt tcacagtgta caatgaactc |
| 2761 | acgaaagtta agtatgtcac tgagggcatg cgtaaacccg cctttctaag cggagaacag |
| 2821 | aagaaagcaa tagtagatct gttattcaag accaaccgca aagtgacagt taagcaattg |
| 2881 | aaagaggact actttaagaa aattgaatgc ttcgattctg tcgagatctc cggggtagaa |
| 2941 | gatcgattta atgcgtcact tggtacgtat catgacctcc taaagataat taaagataag |
| 3001 | gacttcctgg ataacgaaga gaatgaagat atcttagaag atatagtgtt gactcttacc |
| 3061 | ctctttgaag atcgggaaat gattgaggaa agactaaaaa catacgctca cctgttcgac |
| 3121 | gataaggtta tgaaacagtt aaagaggcgt cgctatacgg gctggggacg attgtcgcgg |
| 3181 | aaacttatca acgggataag agacaagcaa agtggtaaaa ctattctcga ttttctaaag |
| 3241 | agcgacggct tcgccaatag gaactttatg cagctgatcc atgatgactc tttaaccttc |
| 3301 | aaagaggata tacaaaaggc acaggtttcc ggacaagggg actcattgca cgaacatatt |
| 3361 | gcgaatcttg ctggttcgcc agccatcaaa aagggcatac tccagacagt caaagtagtg |
| 3421 | gatgagctag ttaaggtcat gggacgtcac aaaccggaaa acattgtaat cgagatggca |
| 3481 | cgcgaaaatc aaacgactca gaaggggcaa aaaaacagtc gagagcggat gaagagaata |
| 3541 | gaagagggta ttaaagaact gggcagccag atcttaaagg agcatcctgt ggaaaatacc |
| 3601 | caattgcaga acgagaaact ttacctctat tacctacaaa atggaaggga catgtatgtt |
| 3661 | gatcaggaac tggacataaa ccgtttatct gattacgacg tcgatcacat tgtaccccaa |
| 3721 | tcctttttga aggacgattc aatcgacaat aaagtgctta cacgctcgga taagaaccga |
| 3781 | gggaaaagtg acaatgttcc aagcgaggaa gtcgtaaaga aaatgaagaa ctattggcgg |
| 3841 | cagctcctaa atgcgaaact gataacgcaa agaaagttcg ataacttaac taaagctgag |
| 3901 | aggggtggct tgtctgaact tgacaaggcc ggatttatta aacgtcagct cgtggaaacc |
| 3961 | cgccaaatca caaagcatgt tgcacagata ctagattccc gaatgaatac gaaatacgac |
| 4021 | gagaacgata agctgattcg ggaagtcaaa gtaatcactt taaagtcaaa attggtgtcg |
| 4081 | gacttcagaa aggattttca attctataaa gttagggaga taaataacta ccaccatgcg |
| 4141 | cacgacgctt atcttaatgc cgtcgtaggg accgcactca ttaagaaata cccgaagcta |
| 4201 | gaaagtgagt ttgtgtatgg tgattacaaa gtttatgacg tccgtaagat gatcgcgaaa |
| 4261 | agcgaacagg agataggcaa ggctacagcc aaatacttct tttattctaa cattatgaat |
| 4321 | ttctttaaga cggaaatcac tctggcaaac ggagagatac gcaaacgacc tttaattgaa |
| 4381 | accaatgggg agacaggtga aatcgtatgg gataagggcc gggacttcgc gacggtgaga |
| 4441 | aaagttttgt ccatgcccca agtcaacata gtaaagaaaa ctgaggtgca gaccggaggg |
| 4501 | ttttcaaagg aatcgattct tccaaaaagg aatagtgata agctcatcgc tcgtaaaaag |
| 4561 | gactgggacc cgaaaaagta cggtggcttc gatagcccta cagttgccta ttctgtccta |
| 4621 | gtagtggcaa aagttgagaa gggaaaatcc aagaaactga agtcagtcaa agaattattg |
| 4681 | gggataacga ttatggagcg ctcgtctttt gaaaagaacc ccatcgactt ccttgaggcg |
| 4741 | aaaggttaca aggaagtaaa aaaggatctc ataattaaac taccaaagta tagtctgttt |
| 4801 | gagttagaaa atggccgaaa acggatgttg gctagcgccg gagagcttca aaaggggaac |
| 4861 | gaactcgcac taccgtctaa atacgtgaat ttcctgtatt tagcgtccca ttacgagaag |
| 4921 | ttgaaaggtt cacctgaaga taacgaacag aagcaacttt ttgttgagca gcacaaacat |
| 4981 | tatctcgacg aaatcataga gcaaatttcg gaattcagta agagagtcat cctagctgat |
| 5041 | gccaatctgg acaaagtatt aagcgcatac aacaagcaca gggataaacc catacgtgag |
| 5101 | caggcggaaa atattatcca tttgtttact cttaccaacc tcggcgctcc agccgcattc |
| 5161 | aagtattttg acacaacgat agatcgcaaa cgatacactt ctaccaagga ggtgctagac |
| 5221 | gcgacactga ttcaccaatc catcacggga ttatatgaaa ctcggataga tttgtcacag |
| 5281 | cttgggggtg actctggtgg ttctggagga tctggtggtt ctactaatct gtcagatatt |
| 5341 | attgaaaagg agaccggtaa gcaactggtt atccaggaat ccatcctcat gctcccagag |
| 5401 | gaggtggaag aagtcattgg gaacaagccg gaaagcgata tactcgtgca caccgcctac |
| 5461 | gacgagagca ccgacgagaa tgtcatgctt ctgactagcg acgcccctga atacaagcct |
| 5521 | tgggctctgg tcatacagga tagcaacggt gagaacaaga ttaagatgct ctctggtggt |
| 5581 | tctggaggat ctggtggttc tactaatctg tcagatatta ttgaaaagga gaccggtaag |
| 5641 | caactggtta tccaggaatc catcctcatg ctcccagagg aggtggaaga agtcattggg |
| 5701 | aacaagccgg aaagcgatat actcgtgcac accgcctacg acgagagcac cgacgagaat |
| 5761 | gtcatgcttc tgactagcga cgcccctgaa tacaagcctt gggctctggt catacaggat |
| 5821 | agcaacggtg agaacaagat taagatgctc tctggtggtt ctcccaagaa gaagaggaaa |
| 5881 | gtctaaccgg tcatcatcac catcaccatt gagtttaaac ccgctgatca gcctcgactg |
| 5941 | tgccttctag ttgccagcca tctgttgttt gcccctcccc cgtgccttcc ttgaccctgg |
| 6001 | aaggtgccac tcccactgtc ctttcctaat aaaatgagga aattgcatcg cattgtctga |
| 6061 | gtaggtgtca ttctattctg gggggtgggg tggggcagga cagcaagggg gaggattggg |
| 6121 | aagacaatag caggcatgct ggggatgcgg tgggctctat ggcttctgag gcggaaagaa |
| 6181 | ccagctgggg ctcgataccg tcgacctcta gctagagctt ggcgtaatca tggtcatagc |
| 6241 | tgtttcctgt gtgaaattgt tatccgctca caattccaca caacatacga gccggaagca |
| 6301 | taaagtgtaa agcctagggt gcctaatgag tgagctaact cacattaatt gcgttgcgct |
| 6361 | cactgcccgc tttccagtcg ggaaacctgt cgtgccagct gcattaatga atcggccaac |
| 6421 | gcgcggggag aggcggtttg cgtattgggc gctcttccgc ttcctcgctc actgactcgc |
| 6481 | tgcgctcggt cgttcggctg cggcgagcgg tatcagctca ctcaaaggcg gtaatacggt |
| 6541 | tatccacaga atcaggggat aacgcaggaa agaacatgtg agcaaaaggc cagcaaaagg |
| 6601 | ccaggaaccg taaaaaggcc gcgttgctgg cgtttttcca taggctccgc ccccctgacg |
| 6661 | agcatcacaa aaatcgacgc tcaagtcaga ggtggcgaaa cccgacagga ctataaagat |
| 6721 | accaggcgtt tccccctgga agctccctcg tgcgctctcc tgttccgacc ctgccgctta |
| 6781 | ccggatacct gtccgccttt ctcccttcgg gaagcgtggc gctttctcat agctcacgct |
| 6841 | gtaggtatct cagttcggtg taggtcgttc gctccaagct gggctgtgtg cacgaacccc |
| 6901 | ccgttcagcc cgaccgctgc gccttatccg gtaactatcg tcttgagtcc aacccggtaa |
| 6961 | gacacgactt atcgccactg gcagcagcca ctggtaacag gattagcaga gcgaggtatg |
| 7021 | taggcggtgc tacagagttc ttgaagtggt ggcctaacta cggctacact agaagaacag |
| 7081 | tatttggtat ctgcgctctg ctgaagccag ttaccttcgg aaaaagagtt ggtagctctt |
| 7141 | gatccggcaa acaaaccacc gctggtagcg gtggtttttt tgtttgcaag cagcagatta |
| 7201 | cgcgcagaaa aaaaggatct caagaagatc ctttgatctt ttctacgggg tctgacgctc |
| 7261 | agtggaacga aaactcacgt taagggattt tggtcatgag attatcaaaa aggatcttca |
| 7321 | cctagatcct tttaaattaa aaatgaagtt ttaaatcaat ctaaagtata tatgagtaaa |
| 7381 | cttggtctga cagttaccaa tgcttaatca gtgaggcacc tatctcagcg atctgtctat |
| 7440 | ttcgttcatc catagttgcc tgactccccg tcgtgtagat aactacgata cgggagggct |
| 7501 | taccatctgg ccccagtgct gcaatgatac cgcgagaccc acgctcaccg gctccagatt |
| 7561 | tatcagcaat aaaccagcca gccggaaggg ccgagcgcag aagtggtcct gcaactttat |
| 7621 | ccgcctccat ccagtctatt aattgttgcc gggaagctag agtaagtagt tcgccagtta |
| 7681 | atagtttgcg caacgttgtt gccattgcta caggcatcgt ggtgtcacgc tcgtcgtttg |
| 7741 | gtatggcttc attcagctcc ggttcccaac gatcaaggcg agttacatga tcccccatgt |
| 7801 | tgtgcaaaaa agcggttagc tccttcggtc ctccgatcgt tgtcagaagt aagttggccg |
| 7861 | cagtgttatc actcatggtt atggcagcac tgcataattc tcttactgtc atgccatccg |
| 7921 | taagatgctt ttctgtgact ggtgagtact caaccaagtc attctgagaa tagtgtatgc |
| 7981 | ggcgaccgag ttgctcttgc ccggcgtcaa tacgggataa taccgcgcca catagcagaa |
| 8041 | ctttaaaagt gctcatcatt ggaaaacgtt cttcggggcg aaaactctca aggatcttac |
| 8101 | cgctgttgag atccagttcg atgtaaccca ctcgtgcacc caactgatct tcagcatctt |
| 8161 | ttactttcac cagcgtttct gggtgagcaa aaacaggaag gcaaaatgcc gcaaaaaagg |
| 8221 | gaataagggc gacacggaaa tgttgaatac tcatactctt cctttttcaa tattattgaa |
| 8281 | gcatttatca gggttattgt ctcatgagcg gatacatatt tgaatgtatt tagaaaaata |
| 8341 | aacaaatagg ggttccgcgc acatttcccc gaaaagtgcc acctgacgtc gacggatcgg |
| 8401 | gagatcgatc tcccgatccc ctagggtcga ctctcagtac aatctgctct gatgccgcat |
| 8461 | agttaagcca gtatctgctc cctgcttgtg tgttggaggt cgctgagtag tgcgcgagca |
| 8521 | aaatttaagc tacaacaagg caaggcttga ccgacaattg catgaagaat ctgcttaggg |
| 8581 | ttaggcgttt tgcgctgctt cgcgatgtac gggccagata tacgcgttga cattgattat |
| 8641 | tgactagtta ttaatagtaa tcaattacgg ggtcattagt tcatagccca tatatggagt |
| 8701 | tccgcgttac ataacttacg gtaaatggcc cgcctggctg accgcccaac gacccccgcc |
| 8761 | cattgacgtc aataatgacg tatgttccca tagtaacgcc aatagggact ttccattgac |
| 8821 | gtcaatgggt ggagtattta cggtaaactg cccacttggc agtacatcaa gtgtatc |

[0086] In some embodiments, the BE4 nucleic acid sequence is selected from one of the following:

Original BE4
(SEQ ID NO: 13)
ATGagctcagagactggcccagtggctgtggaccccacattgagacggcggatcgagccccatgagtttgaggtattcttcgatccgaga
gagctccgcaaggagacctgcctgctttacgaaattaattgggggggccggcactccatttggcgacatacatcacagaacactaacaag
cacgtcgaagtcaacttcatcgagaagttcacgacagaaagatatttctgtccgaacacaaggtgcagcattacctggtttctcagctgg
agcccatgcggcgaatgtagtagggccatcactgaattcctgtcaaggtatccccacgtcactctgtttatttacatcgcaaggctgtac
caccacgctgacccccgcaatcgacaaggcctgcgggatttgatctcttcaggtgtgactatccaaattatgactgagcaggagtcagga
tactgctggagaaactttgtgaattatagcccgagtaatgaagcccactggcctaggtatccccatctgtgggtacgactgtacgttctt
gaactgtactgcatcatactgggcctgcctccttgtctcaacattctgagaaggaagcagccacagctgacattctttaccatcgctctt
cagtcttgtcattaccagcgactgcccccacacattctctgggccaccgggttgaaatctggtggttcttctggtggttctagcggcagc
gagactcccgggacctcagagtccgccacacccgaaagttctggtggttcttctggtggttctgataaaaagtattctattggtttagcc
atcggcactaattccgttggatgggctgtcataaccgatgaatacaaagtaccttcaaagaaatttaaggtgttggggaacacagaccgt
cattcgattaaaaagaatcttatcggtgccctcctattcgatagtggcgaaacggcagaggcgactcgcctgaaacgaaccgctcggaga
aggtatacacgtcgcaagaaccgaatatgttacttacaagaaatttttagcaatgagatggccaaagttgacgattctttctttcaccgt
ttggaagagtccttccttgtcgaagaggacaagaaacatgaacggcaccccatctttggaaacatagtagatgaggtggcatatcatgaa
aagtacccaacgatttatcacctcagaaaaaagctagttgactcaactgataaagcggacctgaggttaatctacttggctcttgcccat
atgataaagttccgtgggcactttctcattgagggtgatctaaatccggacaactcggatgtcgacaaactgttcatccagttagtacaa
acctataatcagttgtttgaagagaaccctataaatgcaagtggcgtggatgcgaaggctattcttagcgcccgcctctctaaatcccga
cggctagaaaacctgatcgcacaattacccggagagaagaaaaatgggttgttcggtaaccttatagcgctctcactaggcctgacacca
aattttaagtcgaacttcgacttagctgaagatgccaaattgcagcttagtaaggacacgtacgatgacgatctcgacaatctactggca
caaattggagatcagtatgcggacttatttttggctgccaaaaaccttagcgatgcaatcctcctatctgacatactgagagttaatact
gagattaccaaggcgccgttatccgcttcaatgatcaaaaggtacgatgaacatcaccaagacttgacacttctcaaggccctagtccgt
cagcaactgcctgagaaatataaggaaatattctttgatcagtcgaaaaacgggtacgcaggttatattgacggcggagcgagtcaagag
gaattctacaagtttatcaaacccatattagagaagatggatgggacggaagagttgcttgtaaaactcaatcgcgaagatctactgcga
aagcagcggactttcgacaacggtagcattccacatcaaatccacttaggcgaattgcatgctatacttagaaggcaggaggatttttat
ccgttcctcaaagacaatcgtgaaaagattgagaaaatcctaacctttcgcataccttactatgtgggacccctggcccgagggaactct
cggttcgcatggatgacaagaaagtccgaagaaacgattactccatggaattttgaggaagttgtcgataaaggtgcgtcagctcaatcg
ttcatcgagaggatgaccaactttgacaagaatttaccgaacgaaaaagtattgcctaagcacagtttactttacgagtatttcacagtg
tacaatgaactcacgaaagttaagtatgtcactgagggcatgcgtaaacccgcctttctaagcggagaacagaagaaagcaatagtagat
ctgttattcaagaccaaccgcaaagtgacagttaagcaattgaaagaggactactttaagaaaattgaatgcttcgattctgtcgagatc
tccggggtagaagatcgatttaatgcgtcacttggtacgtatcatgacctcctaaagataattaaagataaggacttcctggataacgaa
gagaatgaagatatcttagaagatatagtgttgactcttaccctctttgaagatcgggaaatgattgaggaaagactaaaaacatacgct
cacctgttcgacgataaggttatgaaacagttaaagaggcgtcgctatacgggctggggacgattgtcgcggaaacttatcaacgggata
agagacaagcaaagtggtaaaactattctcgattttctaaagagcgacggcttcgccaataggaactttatgcagctgatccatgatgac
tctttaaccttcaaagaggatatacaaaaggcacaggtttccggacaaggggactcattgcacgaacatattgcgaatcttgctggttcg
ccagccatcaaaaagggcatactccagacagtcaaagtagtggatgagctagttaaggtcatgggacgtcacaaaccggaaaacattgta
atcgagatggcacgcgaaaatcaaacgactcagaaggggcaaaaaaacagtcgagagcggatgaagagaatagaagagggtattaaagaa
ctgggcagccagatcttaaaggagcatcctgtggaaaatacccaattgcagaacgagaaactttacctctattacctacaaaatggaagg
gacatgtatgttgatcaggaactggacataaaccgtttatctgattacgacgtcgatcacattgtaccccaatcctttttgaaggacgat
tcaatcgacaataaagtgcttacacgctcggataagaaccgagggaaaagtgacaatgttccaagcgaggaagtcgtaaagaaaatgaag
aactattggcggcagctcctaaatgcgaaactgataacgcaaagaaagttcgataacttaactaaagctgagaggggtggcttgtctgaa
cttgacaaggccggatttattaaacgtcagctcgtggaaacccgccaaatcacaaagcatgttgcacagatactagattcccgaatgaat
acgaaatacgacgagaacgataagctgattcgggaagtcaaagtaatcactttaaagtcaaaattggtgtcggacttcagaaaggatttt
caattctataaagttagggagataaataactaccaccatgcgcacgacgcttatcttaatgccgtcgtagggaccgcactcattaagaaa
tacccgaagctagaaagtgagtttgtgtatggtgattacaaagtttatgacgtccgtaagatgatcgcgaaaagcgaacaggagataggc
aaggctacagccaaatacttcttttattctaacattatgaatttctttaagacggaaatcactctggcaaacggagagatacgcaaacga
cctttaattgaaaccaatggggagacaggtgaaatcgtatgggataagggccgggacttcgcgacggtgagaaaagttttgtccatgccc
caagtcaacatagtaaagaaaactgaggtgcagaccggagggttttcaaaggaatcgattcttccaaaaaggaatagtgataagctcatc
gctcgtaaaaaggactgggacccgaaaaagtacggtggcttcgatagccctacagttgcctattctgtcctagtagtggcaaaagttgag
aagggaaaatccaagaaactgaagtcagtcaaagaattattggggataacgattatggagcgctcgtcttttgaaaagaaccccatcgac
ttccttgaggcgaaaggttacaaggaagtaaaaaaggatctcataattaaactaccaaagtatagtctgtttgagttagaaaatggccga
aaacggatgttggctagcgccggagagcttcaaaaggggaacgaactcgcactaccgtctaaatacgtgaatttcctgtatttagcgtcc
cattacgagaagttgaaaggttcacctgaagataacgaacagaagcaactttttgttgagcagcacaaacattatctcgacgaaatcata
gagcaaatttcggaattcagtaagagagtcatcctagctgatgccaatctggacaaagtattaagcgcatacaacaagcacagggataaa
cccatacgtgagcaggcggaaaatattatccatttgtttactcttaccaacctcggcgctccagccgcattcaagtattttgacacaacg
atagatcgcaaacgatacacttctaccaaggaggtgctagacgcgacactgattcaccaatccatcacgggattatatgaaactcggata
gatttgtcacagcttgggggtgactctggtggttctggaggatctggtggttctactaatctgtcagatattattgaaaaggagaccggt
aagcaactggttatccaggaatccatcctcatgctcccagaggaggtggaagaagtcattgggaacaagccggaaagcgatatactcgtg
cacaccgcctacgacgagagcaccgacgagaatgtcatgcttctgactagcgacgcccctgaatacaagccttgggctctggtcatacag
gatagcaacggtgagaacaagattaagatgctctctggtggttctggaggatctggtggttctactaatctgtcagatattattgaaaag
gagaccggtaagcaactggttatccaggaatccatcctcatgctcccagaggaggtggaagaagtcattgggaacaagccggaaagcgat
atactcgtgcacaccgcctacgacgagagcaccgacgagaatgtcatgcttctgactagcgacgcccctgaatacaagccttgggctctg
gtcatacaggatagcaacggtgagaacaagattaagatgctctctggtggttctAAAAGGACGGCGGACGGATCAGAGTTCGAGAGTCCG
AAAAAAAAACGAAAGGTCGAAtaa
BE4 Codon Optimization 1
(SEQ ID NO: 14)
ATGTCATCCGAAACCGGGCCAGTGGCCGTAGACCCAACACTCAGGAGGCGGATAGAACCCCATGAGTTTGAAGTGTTCTTCGACCCCAGA
GAGCTGCGCAAAGAGACTTGCCTCCTGTATGAAATAAATTGGGGGGGTCGCCATTCAATTTGGAGGCACACTAGCCAGAATACTAACAAA
CACGTGGAGGTAAATTTTATCGAGAAGTTTACCACCGAAAGATACTTTTGCCCCAATACACGGTGTTCAATTACCTGGTTTCTGTCATGG
AGTCCATGTGGAGAATGTAGTAGAGCGATAACTGAGTTCCTGTCTCGATATCCTCACGTCACGTTGTTTATATACATCGCTCGGCTTTAT
CACCATGCGGACCCGCGGAACAGGCAAGGTCTTCGGGACCTCATATCCTCTGGGGTGACCATCCAGATAATGACGGAGCAAGAGAGCGGA
TACTGCTGGCGAAACTTTGTTAACTACAGCCCAAGCAATGAGGCACACTGGCCTAGATATCCGCATCTCTGGGTTCGACTGTATGTCCTT
GAACTGTACTGCATAATTCTGGGACTTCCGCCATGCTTGAACATTCTGCGGCGGAAACAACCACAGCTGACCTTTTTCACGATTGCTCTC
CAAAGTTGTCACTACCAGCGATTGCCACCCCACATCTTGTGGGCTACTGGACTCAAGTCTGGAGGAAGTTCAGGCGGAAGCAGCGGGTCT
GAAACGCCCGGAACCTCAGAGAGCGCAACGCCCGAAAGCTCTGGAGGGTCAAGTGGTGGTAGTGATAAGAAATACTCCATCGGCCTCGCC
ATCGGTACGAATTCTGTCGGTTGGGCCGTTATCACCGATGAGTACAAGGTCCCTTCTAAGAAATTCAAGGTTTTGGGCAATACAGACCGC
CATTCTATAAAAAAAAACCTGATCGGCGCCCTTTTGTTTGACAGTGGTGAGACTGCTGAAGCGACTCGCCTGAAGCGAACTGCCAGGAGG
CGGTATACGAGGCGAAAAAACCGAATTTGTTACCTCCAGGAGATTTTCTCAAATGAAATGGCCAAGGTAGATGATAGTTTTTTTCACCGC
TTGGAAGAAAGTTTTCTCGTTGAGGAGGACAAAAAGCACGAGAGGCACCCAATCTTTGGCAACATAGTCGATGAGGTCGCATACCATGAG
AAATATCCTACGATCTATCATCTCCGCAAGAAGCTGGTCGATAGCACGGATAAAGCTGACCTCCGGCTGATCTACCTTGCTCTTGCTCAC
ATGATTAAATTCAGGGGCCATTTCCTGATAGAAGGAGACCTCAATCCCGACAATTCTGATGTCGACAAACTGTTTATTCAGCTCGTTCAG
ACCTATAATCAACTCTTTGAGGAGAACCCCATCAATGCTTCAGGGGTGGACGCAAAGGCCATTTTGTCCGCGCGCTTGAGTAAATCACGA
CGCCTCGAGAATTTGATAGCTCAACTGCCGGGTGAGAAGAAAAACGGGTTGTTTGGGAATCTCATAGCGTTGAGTTTGGGACTTACGCCA
AACTTTAAGTCTAACTTTGATTTGGCCGAAGATGCCAAATTGCAGCTGTCCAAAGATACCTATGATGACGACTTGGATAACCTTCTTGCG
CAGATTGGTGACCAATACGCGGATCTGTTTCTTGCCGCAAAAAATCTGTCCGACGCCATACTCTTGTCCGATATACTGCGCGTCAATACT
GAGATAACTAAGGCTCCCCTCAGCGCGTCCATGATTAAAAGATACGATGAGCACCACCAAGATCTCACTCTGTTGAAAGCCCTGGTTCGC
CAGCAGCTTCCAGAGAAGTATAAGGAGATATTTTTCGACCAATCTAAAAACGGCTATGCGGGTTACATTGACGGTGGCGCCTCTCAAGAA
GAATTCTACAAGTTTATAAAGCCGATACTTGAGAAAATGGACGGTACAGAGGAATTGTTGGTTAAGCTCAATCGCGAGGACTTGTTGAGA
AAGCAGCGCACATTTGACAATGGTAGTATTCCACACCAGATTCATCTGGGCGAGTTGCATGCCATTCTTAGAAGACAAGAAGATTTTTAT
CCGTTTCTGAAAGATAACAGAGAAAAGATTGAAAAGATACTTACCTTTCGCATACCGTATTATGTAGGTCCCCTGGCTAGAGGGAACAGT
CGCTTCGCTTGGATGACTCGAAAATCAGAAGAAACAATAACCCCCTGGAATTTTGAAGAAGTGGTAGATAAAGGTGCGAGTGCCCAATCT
TTTATTGAGCGGATGACAAATTTTGACAAGAATCTGCCTAACGAAAAGGTGCTTCCCAAGCATTCCCTTTTGTATGAATACTTTACAGTA
TATAATGAACTGACTAAAGTGAAGTACGTTACCGAGGGGATGCGAAAGCCAGCTTTTCTCAGTGGCGAGCAGAAAAAAGCAATAGTTGAC
CTGCTGTTCAAGACGAATAGGAAGGTTACCGTCAAACAGCTCAAAGAAGATTACTTTAAAAAGATCGAATGTTTTGATTCAGTTGAGATA
AGCGGAGTAGAGGATAGATTTAACGCAAGTCTTGGAACTTATCATGACCTTTTGAAGATCATCAAGGATAAAGATTTTTTGGACAACGAG
GAGAATGAAGATATCCTGGAAGATATAGTACTTACCTTGACGCTTTTTGAAGATCGAGAGATGATCGAGGAGCGACTTAAGACGTACGCA
CATCTCTTTGACGATAAGGTTATGAAACAATTGAAACGCCGGCGGTATACTGGCTGGGGCAGGCTTTCTCGAAAGCTGATTAATGGTATC
CGCGATAAGCAGTCTGGAAAGACAATCCTTGACTTTCTGAAAAGTGATGGATTTGCAAATAGAAACTTTATGCAGCTTATACATGATGAC
TCTTTGACGTTCAAGGAAGACATCCAGAAGGCACAGGTATCCGGCCAAGGGGATAGCCTCCATGAACACATAGCCAACCTGGCCGGCTCA
CCAGCTATTAAAAAGGGAATATTGCAAACCGTTAAGGTTGTTGACGAACTCGTTAAGGTTATGGGCCGACACAAACCAGAGAATATCGTG
ATTGAGATGGCTAGGGAGAATCAGACCACTCAAAAAGGTCAGAAAAATTCTCGCGAAAGGATGAAGCGAATTGAAGAGGGAATCAAAGAA
CTTGGCTCTCAAATTTTGAAAGAGCACCCGGTAGAAAACACTCAGCTGCAGAATGAAAAGCTGTATCTGTATTATCTGCAGAATGGTCGA
GATATGTACGTTGATCAGGAGCTGGATATCAATAGGCTCAGTGACTACGATGTCGACCACATCGTTCCTCAATCTTTCCTGAAAGATGAC
GCTATCGACAACAAAGTGTTGACGCGATCAGATAAGAACCGGGGAAAATCCGACAATGTACCCTCAGAAGAAGTTGTCAAGAAGATGAAA
AACTATTGGAGACAATTGCTGAACGCCAAGCTCATAACACAACGCAAGTTCGATAACTTGACGAAAGCCGAAAGAGGTGGGTTGTCAGAA
TTGGACAAAGCTGGCTTTATTAAGCGCCAATTGGTGGAGACCCGGCAGATTACGAAACACGTAGCACAAATTTTGGATTCACGAATGAAT
ACCAAATACGACGAAAACGACAAATTGATACGCGAGGTGAAAGTGATTACGCTTAAGAGTAAGTTGGTTTCCGATTTCAGGAAGGATTTT
CAGTTTTACAAAGTAAGAGAAATAAACAACTACCACCACGCCCATGATGCTTACCTCAACGCGGTAGTTGGCACAGCTCTTATCAAAAAA
TATCCAAAGCTGGAAAGCGAGTTCGTTTACGGTGACTATAAAGTATACGACGTTCGGAAGATGATAGCCAAATCAGAGCAGGAAATTGGG
AAGGCAACCGCAAAATACTTCTTCTATTCAAACATCATGAACTTCTTTAAGACGGAGATTACGCTCGCGAACGGCGAAATACGCAAGAGG
CCCCTCATAGAGACTAACGGCGAAACCGGGGAGATCGTATGGGACAAAGGACGGGACTTTGCGACCGTTAGAAAAGTACTTTCAATGCCA
CAAGTGAATATTGTTAAAAAGACAGAAGTACAAACAGGGGGGTTCAGTAAGGAATCCATTTTGCCCAAGCGGAACAGTGATAAATTGATA
GCAAGGAAAAAAGATTGGGACCCTAAGAAGTACGGTGGTTTCGACTCTCCTACCGTTGCATATTCAGTCCTTGTAGTTGCGAAAGTGGAA
AAGGGGAAAAGTAAGAAGCTTAAGAGTGTTAAAGAGCTTCTGGGCATAACCATAATGGAACGGTCTAGCTTCGAGAAAAATCCAATTGAC
TTTCTCGAGGCTAAAGGTTACAAGGAGGTAAAAAAGGACCTGATAATTAAACTCCCAAAGTACAGTCTCTTCGAGTTGGAGAATGGGAGG
AAGAGAATGTTGGCATCTGCAGGGGAGCTCCAAAAGGGGAACGAGCTGGCTCTGCCTTCAAAATACGTGAACTTTCTGTACCTGGCCAGC
CACTACGAGAAACTCAAGGGTTCTCCTGAGGATAACGAGCAGAAACAGCTGTTTGTAGAGCAGCACAAGCATTACCTGGACGAGATAATT
GAGCAAATTAGTGAGTTCTCAAAAAGAGTAATCCTTGCAGACGCGAATCTGGATAAAGTTCTTTCCGCCTATAATAAGCACCGGGACAAG
CCTATACGAGAACAAGCCGAGAACATCATTCACCTCTTTACCCTTACTAATCTGGGCGCGCCGGCCGCCTTCAAATACTTCGACACCACG
ATAGACAGGAAAAGGTATACGAGTACCAAAGAAGTACTTGACGCCACTCTCATCCACCAGTCTATAACAGGGTTGTACGAAACGAGGATA
GATTTGTCCCAGCTCGGCGGCGACTCAGGAGGGTCAGGCGGCTCCGGTGGATCAACGAATCTTTCCGACATAATCGAGAAAGAAACCGGC
AAACAGTTGGTGATCCAAGAATCAATCCTGATGCTGCCTGAAGAAGTAGAAGAGGTGATTGGCAACAAACCTGAGTCTGACATTCTTGTC
CACACCGCGTATGACGAGAGCACGGACGAGAACGTTATGCTTCTCACTAGCGACGCCCCTGAGTATAAACCATGGGCGCTGGTCATCCAA
GATTCCAATGGGGAAAACAAGATTAAGATGCTTAGTGGTGGGTCTGGAGGGAGCGGTGGGTCCACGAACCTCAGCGACATTATTGAAAAA
GAGACTGGTAAACAACTTGTAATACAAGAGTCTATTCTGATGTTGCCTGAAGAGGTGGAGGAGGTGATTGGGAACAAACCGGAGTCTGAT
ATACTTGTTCATACCGCCTATGACGAATCTACTGATGAGAATGTGATGCTTTTaACGTCAGACGCTCCCGAGTACAAACCCTGGGCTCTG
GTGATTCAGGACAGCAATGGTGAGAATAAGATTAAAATGTTGAGTGGGGGCTCAAAGCGCACGGCTGACGGTAGCGAATTTGAGAGCCCC
AAAAAAAAACGAAAGGTCGAAtaa
BE4 Codon Optimization 2
(SEQ ID NO: 15)
ATGAGCAGCGAGACAGGCCCTGTGGCTGTGGATCCTACACTGCGGAGAAGAATCGAGCCCCACGAGTTCGAGGTGTTCTTCGACCCCAGA
GAGCTGCGGAAAGAGACATGCCTGCTGTACGAGATCAACTGGGGCGGCAGACACTCTATCTGGCGGCACACAAGCCAGAACACCAACAAG
CACGTGGAAGTGAACTTTATCGAGAAGTTTACGACCGAGCGGTACTTCTGCCCCAACACCAGATGCAGCATCACCTGGTTTCTGAGCTGG
TCCCCTTGCGGCGAGTGCAGCAGAGCCATCACCGAGTTTCTGTCCAGATATCCCCACGTGACCCTGTTCATCTATATCGCCCGGCTGTAC
CACCACGCCGATCCTAGAAATAGACAGGGACTGCGCGACCTGATCAGCAGCGGAGTGACCATCCAGATCATGACCGAGCAAGAGAGCGGC
TACTGCTGGCGGAACTTCGTGAACTACAGCCCCAGCAACGAAGCCCACTGGCCTAGATATCCTCACCTGTGGGTCCGACTGTACGTGCTG
GAACTGTACTGCATCATCCTGGGCCTGCCTCCATGCCTGAACATCCTGAGAAGAAAGCAGCCTCAGCTGACCTTCTTCACAATCGCCCTG
CAGAGCTGCCACTACCAGAGACTGCCTCCACACATCCTGTGGGCCACCGGACTTAAGAGCGGAGGATCTAGCGGCGGCTCTAGCGGATCT
GAGACACCTGGCACAAGCGAGTCTGCCACACCTGAGAGTAGCGGCGGATCTTCTGGCGGCTCCGACAAGAAGTACTCTATCGGACTGGCC
ATCGGCACCAACTCTGTTGGATGGGCCGTGATCACCGACGAGTACAAGGTGCCCAGCAAGAAATTCAAGGTGCTGGGCAACACCGACCGG
CACAGCATCAAGAAGAATCTGATCGGCGCCCTGCTGTTCGACTCTGGCGAAACAGCCGAAGCCACCAGACTGAAGAGAACCGCCAGGCGG
AGATACACCCGGCGGAAGAACCGGATCTGCTACCTGCAAGAGATCTTCAGCAACGAGATGGCCAAGGTGGACGACAGCTTCTTCCACAGA
CTGGAAGAGTCCTTCCTGGTGGAAGAGGACAAGAAGCACGAGCGGCACCCCATCTTCGGCAACATCGTGGATGAGGTGGCCTACCACGAG
AAGTACCCCACCATCTACCACCTGAGAAAGAAACTGGTGGACAGCACCGACAAGGCCGACCTGAGACTGATCTACCTGGCTCTGGCCCAC
ATGATCAAGTTCCGGGGCCACTTTCTGATCGAGGGCGATCTGAACCCCGACAACAGCGACGTGGACAAGCTGTTCATCCAGCTGGTGCAG
ACCTACAACCAGCTGTTCGAGGAAAACCCCATCAACGCCTCTGGCGTGGACGCCAAGGCTATCCTGTCTGCCAGACTGAGCAAGAGCAGA
AGGCTGGAAAACCTGATCGCCCAGCTGCCTGGCGAGAAGAAGAATGGCCTGTTCGGCAACCTGATTGCCCTGAGCCTGGGACTGACCCCT
AACTTCAAGAGCAACTTCGACCTGGCCGAGGATGCCAAACTGCAGCTGAGCAAGGACACCTACGACGACGACCTGGACAATCTGCTGGCC
CAGATCGGCGATCAGTACGCCGACTTGTTTCTGGCCGCCAAGAACCTGTCCGACGCCATCCTGCTGAGCGATATCCTGAGAGTGAACACC
GAGATCACAAAGGCCCCTCTGAGCGCCTCTATGATCAAGAGATACGACGAGCACCACCAGGATCTGACCCTGCTGAAGGCCCTCGTTAGA
CAGCAGCTGCCAGAGAAGTACAAAGAGATTTTCTTCGATCAGTCCAAGAACGGCTACGCCGGCTACATTGATGGCGGAGCCAGCCAAGAG
GAATTCTACAAGTTCATCAAGCCCATCCTGGAAAAGATGGACGGCACCGAGGAACTGCTGGTCAAGCTGAACAGAGAGGACCTGCTGCGG
AAGCAGCGGACCTTCGACAATGGCTCTATCCCTCACCAGATCCACCTGGGAGAGCTGCACGCCATTCTGCGGAGACAAGAGGACTTTTAC
CCATTCCTGAAGGACAACCGGGAAAAGATCGAGAAGATCCTGACCTTCAGGATCCCCTACTACGTGGGACCACTGGCCAGAGGCAATAGC
AGATTCGCCTGGATGACCAGAAAGAGCGAGGAAACCATCACACCCTGGAACTTCGAGGAAGTGGTGGACAAGGGCGCCAGCGCTCAGTCC
TTCATCGAGCGGATGACCAACTTCGATAAGAACCTGCCTAACGAGAAGGTGCTGCCCAAGCACTCCCTGCTGTATGAGTACTTCACCGTG
TACAACGAGCTGACCAAAGTGAAATACGTGACCGAGGGAATGAGAAAGCCCGCCTTTCTGAGCGGCGAGCAGAAAAAGGCCATTGTGGAT
CTGCTGTTCAAGACCAACCGGAAAGTGACCGTGAAGCAGCTGAAAGAGGACTACTTCAAGAAAATCGAGTGCTTCGACAGCGTGGAAATC
AGCGGCGTGGAAGATCGGTTCAATGCCAGCCTGGGCACATACCACGACCTGCTGAAAATTATCAAGGACAAGGACTTCCTGGACAACGAA
GAGAACGAGGACATTCTCGAGGACATCGTGCTGACCCTGACACTGTTTGAGGACAGAGAGATGATCGAGGAACGGCTGAAAACATACGCC
CACCTGTTCGACGACAAAGTGATGAAGCAACTGAAGCGGAGGCGGTACACAGGCTGGGGCAGACTGTCTCGGAAGCTGATCAACGGCATC
CGGGATAAGCAGTCCGGCAAGACAATCCTGGATTTCCTGAAGTCCGACGGCTTCGCCAACAGAAACTTCATGCAGCTGATCCACGACGAC
AGCCTGACCTTTAAAGAGGACATCCAGAAAGCCCAGGTGTCCGGCCAAGGCGATTCTCTGCACGAGCACATTGCCAACCTGGCCGGATCT
CCCGCCATTAAGAAGGGCATCCTGCAGACAGTGAAGGTGGTGGACGAGCTTGTGAAAGTGATGGGCAGACACAAGCCCGAGAACATCGTG
ATCGAAATGGCCAGAGAGAACCAGACCACACAGAAGGGCCAGAAGAACAGCCGCGAGAGAATGAAGCGGATCGAAGAGGGCATCAAAGAG
CTGGGCAGCCAGATCCTGAAAGAACACCCCGTGGAAAACACCCAGCTGCAGAACGAGAAGCTGTACCTGTACTACCTGCAGAATGGACGG
GATATGTACGTGGACCAAGAGCTGGACATCAACCGGCTGAGCGACTACGATGTGGACCATATCGTGCCCCAGAGCTTTCTGAAGGACGAC
TCCATCGATAACAAGGTCCTGACCAGAAGCGACAAGAACCGGGGCAAGAGCGATAACGTGCCCTCCGAAGAGGTGGTCAAGAAGATGAAG
AACTACTGGCGACAGCTGCTGAACGCCAAGCTGATTACCCAGCGGAAGTTCGATAACCTGACCAAGGCCGAGAGAGGCGGCCTGAGCGAA
CTTGATAAGGCCGGCTTCATTAAGCGGCAGCTGGTGGAAACCCGGCAGATCACCAAACACGTGGCACAGATTCTGGACTCCCGGATGAAC
ACTAAGTACGACGAGAATGACAAGCTGATCCGGGAAGTGAAAGTCATCACCCTGAAGTCTAAGCTGGTGTCCGATTTCCGGAAGGATTTC
CAGTTCTACAAAGTGCGGGAAATCAACAACTACCATCACGCCCACGACGCCTACCTGAATGCCGTTGTTGGAACAGCCCTGATCAAGAAG
TATCCCAAGCTGGAAAGCGAGTTCGTGTACGGCGACTACAAGGTGTACGACGTGCGGAAGATGATCGCCAAGAGCGAACAAGAGATCGGC
AAGGCTACCGCCAAGTACTTTTTCTACAGCAACATCATGAACTTTTTCAAGACAGAGATCACCCTGGCCAACGGCGAGATCCGGAAAAGA
CCCCTGATCGAGACAAACGGCGAAACCGGGGAGATCGTGTGGGATAAGGGCAGAGATTTTGCCACAGTGCGGAAAGTGCTGAGCATGCCC
CAAGTGAATATCGTGAAGAAAACCGAGGTGCAGACAGGCGGCTTCAGCAAAGAGTCTATCCTGCCTAAGCGGAACAGCGATAAGCTGATC
GCCAGAAAGAAGGACTGGGACCCTAAGAAGTACGGCGGCTTCGATAGCCCTACCGTGGCCTATTCTGTGCTGGTGGTGGCCAAAGTGGAA
AAGGGCAAGTCCAAAAAGCTCAAGAGCGTGAAAGAGCTGCTGGGGATCACCATCATGGAAAGAAGCAGCTTTGAGAAGAACCCGATCGAC
TTTCTGGAAGCCAAGGGCTACAAAGAAGTCAAGAAGGACCTCATCATCAAGCTCCCCAAGTACAGCCTGTTCGAGCTGGAAAATGGCCGG
AAGCGGATGCTGGCCTCAGCAGGCGAACTGCAGAAAGGCAATGAACTGGCCCTGCCTAGCAAATACGTCAACTTCCTGTACCTGGCCAGC
CACTATGAGAAGCTGAAGGGCAGCCCCGAGGACAATGAGCAAAAGCAGCTGTTTGTGGAACAGCACAAGCACTACCTGGACGAGATCATC
GAGCAGATCAGCGAGTTCTCCAAGAGAGTGATCCTGGCCGACGCTAACCTGGATAAGGTGCTGTCTGCCTATAACAAGCACCGGGACAAG
CCTATCAGAGAGCAGGCCGAGAATATCATCCACCTGTTTACCCTGACCAACCTGGGAGCCCCTGCCGCCTTCAAGTACTTCGACACCACC
ATCGACCGGAAGAGGTACACCAGCACCAAAGAGGTGCTGGACGCCACACTGATCCACCAGTCTATCACCGGCCTGTACGAAACCCGGATC
GACCTGTCTCAGCTCGGCGGCGATTCTGGTGGTTCTGGCGGAAGTGGCGGATCCACCAATCTGAGCGACATCATCGAAAAAGAGACAGGC
AAGCAGCTCGTGATCCAAGAATCCATCCTGATGCTGCCTGAAGAGGTTGAGGAAGTGATCGGCAACAAGCCTGAGTCCGACATCCTGGTG
CACACCGCCTACGATGAGAGCACCGATGAGAACGTCATGCTGCTGACAAGCGACGCCCCTGAGTACAAGCCTTGGGCTCTCGTGATTCAG
GACAGCAATGGGGAGAACAAGATCAAGATGCTGAGCGGAGGTAGCGGAGGCAGTGGCGGAAGCACAAACCTGTCTGATATCATTGAAAAA
GAAACCGGGAAGCAACTGGTCATTCAAGAGTCCATTCTCATGCTCCCGGAAGAAGTCGAGGAAGTCATTGGAAACAAACCCGAGAGCGAT
ATTCTGGTCCACACAGCCTATGACGAGTCTACAGACGAAAACGTGATGCTCCTGACCTCTGACGCTCCCGAGTATAAGCCCTGGGCACTT
GTTATCCAGGACTCTAACGGGGAAAACAAAATCAAAATGTTGTCCGGCGGCAGCAAGCGGACAGCCGATGGATCTGAGTTCGAGAGCCCC
AAGAAGAAACGGAAGGTgGAGtaa

[0087] By “base editing activity” is meant acting to chemically alter a base within a polynucleotide. In one embodiment, a first base is converted to a second base. In one embodiment, the base editing activity is cytidine deaminase activity, e.g., converting target CG to TA. In another embodiment, the base editing activity is adenosine or adenine deaminase activity, e.g., converting A⋅T to G⋅C.

[0088] The term “base editor system” refers to a system for editing a nucleobase of a target nucleotide sequence. In various embodiments, the base editor (BE) system comprises (1) a polynucleotide programmable nucleotide binding domain and a deaminase domain for deaminating said nucleobase; and (2) a guide polynucleotide (e.g., guide RNA) in conjunction with the polynucleotide programmable nucleotide binding domain. In some embodiments, the base editor system comprises (1) a base editor (BE) comprising a polynucleotide programmable DNA binding domain and a deaminase domain for deaminating said nucleobase; and (2) a guide RNA in conjunction with the polynucleotide programmable DNA binding domain. In some embodiments, the polynucleotide programmable nucleotide binding domain is a polynucleotide programmable DNA binding domain. In some embodiments, the base editor is a cytidine base editor (CBE). In some embodiments, the base editor is an adenine or adenosine base editor (ABE).

[0089] The term “conservative amino acid substitution” or “conservative mutation” refers to the replacement of one amino acid by another amino acid with a common property. A functional way to define common properties between individual amino acids is to analyze the normalized frequencies of amino acid changes between corresponding proteins of homologous organisms (Schulz, G. E. and Schirmer, R. H., Principles of Protein Structure, Springer-Verlag, New York (1979)). According to such analyses, groups of amino acids can be defined where amino acids within a group exchange preferentially with each other, and therefore resemble each other most in their impact on the overall protein structure (Schulz, G. E. and Schirmer, R. H., supra). Non-limiting examples of conservative mutations include amino acid substitutions of amino acids, for example, lysine for arginine and vice versa such that a positive charge can be maintained; glutamic acid for aspartic acid and vice versa such that a negative charge can be maintained; serine for threonine such that a free —OH can be maintained; and glutamine for asparagine such that a free —NH₂ can be maintained.

[0090] The term “coding sequence” or “protein coding sequence” as used interchangeably herein refers to a segment of a polynucleotide that codes for a protein. The region or sequence is bounded nearer the 5′ end by a start codon and nearer the 3′ end with a stop codon. Coding sequences can also be referred to as open reading frames.

[0091] By “cytidine deaminase” is meant a polypeptide or fragment thereof capable of catalyzing a deamination reaction that converts an amino group to a carbonyl group. In one embodiment, the cytidine deaminase converts cytosine to uracil or 5-methylcytosine to thymine. PmCDA1, which is derived from Petromyzon marinus (Petromyzon marinus cytosine deaminase 1, “PmCDA1”), AID (Activation-induced cytidine deaminase; AICDA), which is derived from a mammal (e.g., human, swine, bovine, horse, monkey etc.), and APOBEC are exemplary cytidine deaminases.

[0092] The term “deaminase” or “deaminase domain,” as used herein, refers to a protein or enzyme that catalyzes a deamination reaction. In some embodiments, the deaminase or deaminase domain is a cytidine deaminase, catalyzing the hydrolytic deamination of cytidine or deoxycytidine to uridine or deoxyuridine, respectively. In some embodiments, the deaminase or deaminase domain is a cytosine deaminase, catalyzing the hydrolytic deamination of cytosine to uracil. In some embodiments, the deaminase is an adenosine deaminase, which catalyzes the hydrolytic deamination of adenine to hypoxanthine. In some embodiments, the deaminase is an adenosine deaminase, which catalyzes the hydrolytic deamination of adenosine or adenine (A) to inosine (I). In some embodiments, the deaminase or deaminase domain is an adenosine deaminase, catalyzing the hydrolytic deamination of adenosine or deoxyadenosine to inosine or deoxyinosine, respectively. In some embodiments, the adenosine deaminase catalyzes the hydrolytic deamination of adenosine in deoxyribonucleic acid (DNA). The adenosine deaminases (e.g. engineered adenosine deaminases, evolved adenosine deaminases) provided herein can be from any organism, such as a bacterium. In some embodiments, the adenosine deaminase is from a bacterium, such as E. coli, S. aureus, S. typhi, S. putrefaciens, H influenzae, or C. crescentus. In some embodiments, the adenosine deaminase is a TadA deaminase. In some embodiments, the deaminase or deaminase domain is a variant of a naturally occurring deaminase from an organism, such as a human, chimpanzee, gorilla, monkey, cow, dog, rat, or mouse. In some embodiments, the deaminase or deaminase domain does not occur in nature. For example, in some embodiments, the deaminase or deaminase domain is at least 50%, at least 55%, at least 60%, at least 65%, at least 70%, at least 75% at least 80%, at least 85%, at least 90%, at least 91%, at least 92%, at least 93%, at least 94%, at least 95%, at least 96%, at least 97%, at least 98%, at least 99%, at least 99.1%, at least 99.2%, at least 99.3%, at least 99.4%, at least 99.5%, at least 99.6%, at least 99.7%, at least 99.8%, or at least 99.9% identical to a naturally occurring deaminase. For example, deaminase domains are described in International PCT Application Nos. PCT/2017/045381 (WO2018/027078) and PCT/US2016/058344 (WO2017/070632), each of which is incorporated herein by reference for its entirety. Also see Komor, A. C., et al., “Programmable editing of a target base in genomic DNA without double-stranded DNA cleavage” Nature 533, 420-424 (2016); Gaudelli, N. M., et al., “Programmable base editing of A⋅T to G⋅C in genomic DNA without DNA cleavage” Nature 551, 464-471 (2017); Komor, A. C., et al., “Improved base excision repair inhibition and bacteriophage Mu Gam protein yields C:G-to-T:A base editors with higher efficiency and product purity” Science Advances 3:eaao4774 (2017), and Rees, H. A., et al., “Base editing: precision chemistry on the genome and transcriptome of living cells.” Nat Rev Genet. 2018 December; 19(12):770-788. doi: 10.1038/s41576-018-0059-1, the entire contents of which are hereby incorporated by reference.

[0093] By “detectable label” is meant a composition that when linked to a molecule of interest renders the latter detectable, via spectroscopic, photochemical, biochemical, immunochemical, or chemical means. For example, useful labels include radioactive isotopes, magnetic beads, metallic beads, colloidal particles, fluorescent dyes, electron-dense reagents, enzymes (for example, as commonly used in an ELISA), biotin, digoxigenin, or haptens.

[0094] By “disease” is meant any condition or disorder that damages or interferes with the normal function of a cell, tissue, or organ. Examples of diseases include retinitis pigmentosa, Usher syndrome, sickle cell disease, beta-thalassemia, alpha-1 antitrypsin deficiency (A1AD), hepatic porphyria, medium-chain acyl-CoA dehydrogenase (MCAD) deficiency, lysosomal acid lipase (LAL) deficiency, phenylketonuria, hemochromatosis, Von Gierke disease, Pompe disease, Gaucher disease, Hurler syndrome, cystic fibrosis, or chronic pain. In a particular embodiment, the disease is A1 AD.

[0095] By “effective amount” is meant the amount of an agent or active compound, e.g., a base editor as described herein, that is required to ameliorate the symptoms of a disease relative to an untreated patient or an individual without disease, i.e., a healthy individual. The effective amount of active compound(s) used to practice the present invention for therapeutic treatment of a disease varies depending upon the manner of administration, the age, body weight, and general health of the subject. Ultimately, the attending physician or veterinarian will decide the appropriate amount and dosage regimen. Such amount is referred to as an “effective” amount. In one embodiment, an effective amount is the amount of a base editor of the invention sufficient to introduce an alteration in a gene of interest in a cell (e.g., a cell in vitro or in vivo). In one embodiment, an effective amount is the amount of a base editor required to achieve a therapeutic effect (e.g., to reduce or control retinitis pigmentosa, Usher syndrome, sickle cell disease, beta-thalassemia, alpha-1 antitrypsin deficiency (A1AD), hepatic porphyria, medium-chain acyl-CoA dehydrogenase (MCAD) deficiency, lysosomal acid lipase (LAL) deficiency, phenylketonuria, hemochromatosis, Von Gierke disease, Pompe disease, Gaucher disease, Hurler syndrome, cystic fibrosis, or chronic pain, or a symptom or condition thereof). Such therapeutic effect need not be sufficient to alter a pathogenic gene in all cells of a subject, tissue or organ, but only to alter the pathogenic gene in about 1%, 5%, 10%, 25%, 50%, 75% or more of the cells present in a subject, tissue or organ. In one embodiment, an effective amount is sufficient to ameliorate one or more symptoms of a disease (e.g., retinitis pigmentosa, Usher syndrome, sickle cell disease, beta-thalassemia, alpha-1 antitrypsin deficiency (A1AD), hepatic porphyria, medium-chain acyl-CoA dehydrogenase (MCAD) deficiency, lysosomal acid lipase (LAL) deficiency, phenylketonuria, hemochromatosis, Von Gierke disease, Pompe disease, Gaucher disease, Hurler syndrome, cystic fibrosis, or chronic pain).

[0096] By “fragment” is meant a portion of a polypeptide or nucleic acid molecule. This portion contains, preferably, at least 10%, 20%, 30%, 40%, 50%, 60%, 70%, 80%, or 90% of the entire length of the reference nucleic acid molecule or polypeptide. A fragment may contain 10, 20, 30, 40, 50, 60, 70, 80, 90, or 100, 200, 300, 400, 500, 600, 700, 800, 900, or 1000 nucleotides or amino acids.

[0097] “Hybridization” means hydrogen bonding, which may be Watson-Crick, Hoogsteen or reversed Hoogsteen hydrogen bonding, between complementary nucleobases. For example, adenine and thymine are complementary nucleobases that pair through the formation of hydrogen bonds.

[0098] The terms “inhibitor of base repair”, “base repair inhibitor”, “IBR” or their grammatical equivalents refer to a protein that is capable in inhibiting the activity of a nucleic acid repair enzyme, for example a base excision repair enzyme. In some embodiments, the IBR is an inhibitor of inosine base excision repair. Exemplary inhibitors of base repair include inhibitors of APE1, Endo III, Endo IV, Endo V, Endo VIII, Fpg, hOGGl, hNEILl, T7 Endol, T4PDG, UDG, hSMUGl, and hAAG. In some embodiments, the base repair inhibitor is an inhibitor of Endo V or hAAG. In some embodiments, the IBR is an inhibitor of Endo V or hAAG. In some embodiments, the IBR is a catalytically inactive EndoV or a catalytically inactive hAAG. In some embodiments, the base repair inhibitor is a catalytically inactive EndoV or a catalytically inactive hAAG. In some embodiments, the base repair inhibitor is uracil glycosylase inhibitor (UGI). UGI refers to a protein that is capable of inhibiting a uracil-DNA glycosylase base-excision repair enzyme. In some embodiments, a UGI domain comprises a wild-type UGI or a fragment of a wild-type UGI. In some embodiments, the UGI proteins provided herein include fragments of UGI and proteins homologous to a UGI or a UGI fragment. In some embodiments, the base repair inhibitor is an inhibitor of inosine base excision repair. In some embodiments, the base repair inhibitor is a “catalytically inactive inosine specific nuclease” or “dead inosine specific nuclease.” Without wishing to be bound by any particular theory, catalytically inactive inosine glycosylases (e.g., alkyl adenine glycosylase (AAG)) can bind inosine, but cannot create an abasic site or remove the inosine, thereby sterically blocking the newly formed inosine moiety from DNA damage/repair mechanisms. In some embodiments, the catalytically inactive inosine specific nuclease can be capable of binding an inosine in a nucleic acid but does not cleave the nucleic acid. Non-limiting exemplary catalytically inactive inosine specific nucleases include catalytically inactive alkyl adenosine glycosylase (AAG nuclease), for example, from a human, and catalytically inactive endonuclease V (EndoV nuclease), for example, from E. coli. In some embodiments, the catalytically inactive AAG nuclease comprises an E125Q mutation or a corresponding mutation in another AAG nuclease.

[0099] The terms “isolated,” “purified,” or “biologically pure” refer to material that is free to varying degrees from components which normally accompany it as found in its native state. “Isolate” denotes a degree of separation from original source or surroundings. “Purify” denotes a degree of separation that is higher than isolation. A “purified” or “biologically pure” protein is sufficiently free of other materials such that any impurities do not materially affect the biological properties of the protein or cause other adverse consequences. That is, a nucleic acid or peptide of this invention is purified if it is substantially free of cellular material, viral material, or culture medium when produced by recombinant DNA techniques, or chemical precursors or other chemicals when chemically synthesized. Purity and homogeneity are typically determined using analytical chemistry techniques, for example, polyacrylamide gel electrophoresis or high-performance liquid chromatography. The term “purified” can denote that a nucleic acid or protein gives rise to essentially one band in an electrophoretic gel. For a protein that can be subjected to modifications, for example, phosphorylation or glycosylation, different modifications may give rise to different isolated proteins, which can be separately purified.

[0100] By “isolated polynucleotide” is meant a nucleic acid (e.g., a DNA) that is free of the genes which, in the naturally-occurring genome of the organism from which the nucleic acid molecule of the invention is derived, flank the gene. The term therefore includes, for example, a recombinant DNA that is incorporated into a vector; into an autonomously replicating plasmid or virus; or into the genomic DNA of a prokaryote or eukaryote; or that exists as a separate molecule (for example, a cDNA or a genomic or cDNA fragment produced by PCR or restriction endonuclease digestion) independent of other sequences. In addition, the term includes an RNA molecule that is transcribed from a DNA molecule, as well as a recombinant DNA that is part of a hybrid gene encoding additional polypeptide sequence.

[0101] By an “isolated polypeptide” is meant a polypeptide of the invention that has been separated from components that naturally accompany it. Typically, the polypeptide is isolated when it is at least 60%, by weight, free from the proteins and naturally-occurring organic molecules with which it is naturally associated. Preferably, the preparation is at least 75%, more preferably at least 90%, and most preferably at least 99%, by weight, a polypeptide of the invention. An isolated polypeptide of the invention may be obtained, for example, by extraction from a natural source, by expression of a recombinant nucleic acid encoding such a polypeptide; or by chemically synthesizing the protein. Purity can be measured by any appropriate method, for example, column chromatography, polyacrylamide gel electrophoresis, or by HPLC analysis.

[0102] The term “linker”, as used herein, can refer to a covalent linker (e.g., covalent bond), a non-covalent linker, a chemical group, or a molecule linking two molecules or moieties, e.g., two components of a protein complex or a ribonucleocomplex, or two domains of a fusion protein, such as, for example, a polynucleotide programmable DNA binding domain (e.g., dCas9) and a deaminase domain (e.g., an adenosine deaminase or a cytidine deaminase). A linker can join different components of, or different portions of components of, a base editor system. For example, in some embodiments, a linker can join a guide polynucleotide binding domain of a polynucleotide programmable nucleotide binding domain and a catalytic domain of a deaminase. In some embodiments, a linker can join a CRISPR polypeptide and a deaminase. In some embodiments, a linker can join a Cas9 and a deaminase. In some embodiments, a linker can join a dCas9 and a deaminase. In some embodiments, a linker can join a nCas9 and a deaminase. In some embodiments, a linker can join a guide polynucleotide and a deaminase. In some embodiments, a linker can join a deaminating component and a polynucleotide programmable nucleotide binding component of a base editor system. In some embodiments, a linker can join a RNA-binding portion of a deaminating component and a polynucleotide programmable nucleotide binding component of a base editor system. In some embodiments, a linker can join a RNA-binding portion of a deaminating component and a RNA-binding portion of a polynucleotide programmable nucleotide binding component of a base editor system. A linker can be positioned between, or flanked by, two groups, molecules, or other moieties and connected to each one via a covalent bond or non-covalent interaction, thus connecting the two. In some embodiments, the linker can be an organic molecule, group, polymer, or chemical moiety. In some embodiments, the linker can be a polynucleotide. In some embodiments, the linker can be a DNA linker. In some embodiments, the linker can be a RNA linker. In some embodiments, a linker can comprise an aptamer capable of binding to a ligand. In some embodiments, the ligand may be carbohydrate, a peptide, a protein, or a nucleic acid. In some embodiments, the linker may comprise an aptamer may be derived from a riboswitch. The riboswitch from which the aptamer is derived may be selected from a theophylline riboswitch, a thiamine pyrophosphate (TPP) riboswitch, an adenosine cobalamin (AdoCbl) riboswitch, an S-adenosyl methionine (SAM) riboswitch, an SAH riboswitch, a flavin mononucleotide (FMN) riboswitch, a tetrahydrofolate riboswitch, a lysine riboswitch, a glycine riboswitch, a purine riboswitch, a GlmS riboswitch, or a pre-queosinel (PreQ1) riboswitch. In some embodiments, a linker may comprise an aptamer bound to a polypeptide or a protein domain, such as a polypeptide ligand. In some embodiments, the polypeptide ligand may be a K Homology (KH) domain, a MS2 coat protein domain, a PP7 coat protein domain, a SfMu Com coat protein domain, a sterile alpha motif, a telomerase Ku binding motif and Ku protein, a telomerase Sm7 binding motif and Sm7 protein, or a RNA recognition motif. In some embodiments, the polypeptide ligand may be a portion of a base editor system component. For example, a nucleobase editing component may comprise a deaminase domain and a RNA recognition motif.

[0103] In some embodiments, the linker can be an amino acid or a plurality of amino acids (e.g., a peptide or protein). In some embodiments, the linker can be about 5-100 amino acids in length, for example, about 5, 6, 7, 8, 9, 10, 11, 12, 13, 14, 15, 16, 17, 18, 19, 20, 20-30, 30-40, 40-50, 50-60, 60-70, 70-80, 80-90, or 90-100 amino acids in length. In some embodiments, the linker can be about 100-150, 150-200, 200-250, 250-300, 300-350, 350-400, 400-450, or 450-500 amino acids in length. Longer or shorter linkers can be also contemplated.

[0104] In some embodiments, a linker joins a gRNA binding domain of an RNA-programmable nuclease, including a Cas9 nuclease domain, and the catalytic domain of a nucleic-acid editing protein (e.g., cytidine or adenosine deaminase). In some embodiments, a linker joins a dCas9 and a nucleic-acid editing protein. For example, the linker is positioned between, or flanked by, two groups, molecules, or other moieties and connected to each one via a covalent bond, thus connecting the two. In some embodiments, the linker is an amino acid or a plurality of amino acids (e.g., a peptide or protein). In some embodiments, the linker is an organic molecule, group, polymer, or chemical moiety. In some embodiments, the linker is 5-200 amino acids in length, for example, 5, 6, 7, 8, 9, 10, 11, 12, 13, 14, 15, 16, 17, 18, 19, 20, 25, 35, 45, 50, 55, 60, 60, 65, 70, 70, 75, 80, 85, 90, 90, 95, 100, 101, 102, 103, 104, 105, 110, 120, 130, 140, 150, 160, 175, 180, 190, or 200 amino acids in length. Longer or shorter linkers are also contemplated. In some embodiments, a linker comprises the amino acid sequence SGSETPGTSESATPES (SEQ ID NO: 16), which may also be referred to as the XTEN linker. In some embodiments, a linker comprises the amino acid sequence SGGS (SEQ ID NO: 17). In some embodiments, a linker comprises (SGGS)ₙ (SEQ ID NO: 18), (GGGS)ₙ (SEQ ID NO: 19), (GGGGS)ₙ (SEQ ID NO: 20), (G)ₙ (SEQ ID NO: 21), (EAAAK)ₙ (SEQ ID NO: 22), (GGS)ₙ (SEQ ID NO: 23), SGSETPGTSESATPES (SEQ ID NO: 16), or (XP)ₙ motif (SEQ ID NO: 24), or a combination of any of these, where n is independently an integer between 1 and 30, and where X is any amino acid. In some embodiments, n is 1, 2, 3, 4, 5, 6, 7, 8, 9, 10, 11, 12, 13, 14, or 15. In some embodiments, a linker comprises a plurality of proline residues and is 5-21, 5-14, 5-9, 5-7 amino acids in length, e.g., PAPAP (SEQ ID NO: 25), PAPAPA (SEQ ID NO: 26), PAPAPAP (SEQ ID NO: 27), PAPAPAPA (SEQ ID NO: 28), P(AP)₄ (SEQ ID NO: 29), P(AP)₇ (SEQ ID NO: 30), P(AP)₁₀ (SEQ ID NO: 31). Such proline-rich linkers are also termed “rigid” linkers.

[0105] In some embodiments, the domains of a base editor are fused via a linker that comprises the amino acid sequence of SGGSSGSETPGTSESATPESSGGS (SEQ ID NO: 32), SGGSSGGSSGSETPGTSESATPESSGGSSGGS (SEQ ID NO: 33), or GGSGGSPGSPAGSPTSTEEGTSESATPESGPGTSTEPSEGSAPGSPAGSPTSTEEGTSTE PSEGSAPGTSTEPSEGSAPGTSESATPESGPGSEPATSGGSGGS (SEQ ID NO: 34). In some embodiments, domains of the base editor are fused via a linker comprising the amino acid sequence SGSETPGTSESATPES (SEQ ID NO: 16), which may also be referred to as the XTEN linker. In some embodiments, the linker is 24 amino acids in length. In some embodiments, the linker comprises the amino acid sequence SGGSSGGSSGSETPGTSESATPES (SEQ ID NO: 35). In some embodiments, the linker is 40 amino acids in length. In some embodiments, the linker comprises the amino acid sequence SGGSSGGSSGSETPGTSESATPESSGGSSGGSSGGSSGGS (SEQ ID NO: 36). In some embodiments, the linker is 64 amino acids in length. In some embodiments, the linker comprises the amino acid sequence SGGSSGGSSGSETPGTSESATPESSGGSSGGSSGGSSGGSSGSETPGTSESATPESSGGS SGGS (SEQ ID NO: 37). In some embodiments, the linker is 92 amino acids in length. In some embodiments, the linker comprises the amino acid sequence

(SEQ ID NO: 38)
PGSPAGSPTSTEEGTSESATPESGPGTSTEPSEGSAPGSPAGSPTSTEEG
TSTEPSEGSAPGTSTEPSEGSAPGTSESATPESGPGSEPATS.

[0106] The term “mutation,” as used herein, refers to a substitution of a residue within a sequence, e.g., a nucleic acid or amino acid sequence, with another residue, or a deletion or insertion of one or more residues within a sequence. Mutations are typically described herein by identifying the original residue followed by the position of the residue within the sequence and by the identity of the newly substituted residue. Various methods for making the amino acid substitutions (mutations) provided herein are well known in the art, and are provided by, for example, Green and Sambrook, Molecular Cloning: A Laboratory Manual (4th ed., Cold Spring Harbor Laboratory Press, Cold Spring Harbor, N.Y. (2012)). In some embodiments, the presently disclosed base editors can efficiently generate an “intended mutation”, such as a point mutation, in a nucleic acid (e.g., a nucleic acid within a genome of a subject) without generating a significant number of unintended mutations, such as unintended point mutations. In some embodiments, an intended mutation is a mutation that is generated by a specific base editor (e.g., cytidine base editor or adenosine base editor) bound to a guide polynucleotide (e.g., gRNA), specifically designed to generate the intended mutation.

[0107] In general, mutations made or identified in a sequence (e.g., an amino acid sequence as described herein) are numbered in relation to a reference (or wild type) sequence, i.e., a sequence that does not contain the mutations. The skilled practitioner in the art would readily understand how to determine the position of mutations in amino acid and nucleic acid sequences relative to a reference sequence.

[0108] The term “non-conservative mutations” involve amino acid substitutions between different groups, for example, lysine for tryptophan, or phenylalanine for serine, etc. In this case, it is preferable for the non-conservative amino acid substitution to not interfere with, or inhibit the biological activity of, the functional variant. The non-conservative amino acid substitution can enhance the biological activity of the functional variant, such that the biological activity of the functional variant is increased as compared to the wild-type protein.

[0109] The term “nuclear localization sequence,” “nuclear localization signal,” or “NLS” refers to an amino acid sequence that promotes import of a protein into the cell nucleus. Nuclear localization sequences are known in the art and described, for example, in Plank et al., International PCT application, PCT/EP2000/011690, filed Nov. 23, 2000, published as WO/2001/038547 on May 31, 2001, the contents of which are incorporated herein by reference for their disclosure of exemplary nuclear localization sequences. In other embodiments, the NLS is an optimized NLS described, for example, by Koblan et al., Nature Biotech. 2018 doi:10.1038/nbt.4172. In some embodiments, an NLS comprises the amino acid sequence

(SEQ ID NO: 40)
KRTADGSEFESPKKKRKV,
(SEQ ID NO: 41)
KRPAATKKAGQAKKKK,
(SEQ ID NO: 42)
KKTELQTTNAENKTKKL,
(SEQ ID NO: 43)
KRGINDRNFWRGENGRKTR,
(SEQ ID NO: 44)
RKSGKIAAIVVKRPRK,
(SEQ ID NO: 45)
PKKKRKV,
or
(SEQ ID NO: 46)
MDSLLMNRRKFLYQFKNVRWAKGRRETYLC.

[0110] The term “nucleobase,” “nitrogenous base,” or “base,” used interchangeably herein, refers to a nitrogen-containing biological compound that forms a nucleoside, which in turn is a component of a nucleotide. The ability of nucleobases to form base pairs and to stack one upon another leads directly to long-chain helical structures such as ribonucleic acid (RNA) and deoxyribonucleic acid (DNA). Five nucleobases—adenine (A), cytosine (C), guanine (G), thymine (T), and uracil (U)—are called primary or canonical. Adenine and guanine are derived from purine, and cytosine, uracil, and thymine are derived from pyrimidine. DNA and RNA can also contain other (non-primary) bases that are modified. Non-limiting exemplary modified nucleobases can include hypoxanthine, xanthine, 7-methylguanine, 5,6-dihydrouracil, 5-methylcytosine (m5C), and 5-hydromethylcytosine. Hypoxanthine and xanthine can be created through mutagen presence, both of them through deamination (replacement of the amine group with a carbonyl group). Hypoxanthine can be modified from adenine. Xanthine can be modified from guanine. Uracil can result from deamination of cytosine. A “nucleoside” consists of a nucleobase and a five carbon sugar (either ribose or deoxyribose). Examples of a nucleoside include adenosine, guanosine, uridine, cytidine, 5-methyluridine (m5U), deoxyadenosine, deoxyguanosine, thymidine, deoxyuridine, and deoxycytidine. Examples of a nucleoside with a modified nucleobase includes inosine (I), xanthosine (X), 7-methylguanosine (m7G), dihydrouridine (D), 5-methylcytidine (m5C), and pseudouridine (Ψ). A “nucleotide” consists of a nucleobase, a five carbon sugar (either ribose or deoxyribose), and at least one phosphate group.

[0111] The terms “nucleic acid” and “nucleic acid molecule,” as used herein, refer to a compound comprising a nucleobase and an acidic moiety, e.g., a nucleoside, a nucleotide, or a polymer of nucleotides. Typically, polymeric nucleic acids, e.g., nucleic acid molecules comprising three or more nucleotides are linear molecules, in which adjacent nucleotides are linked to each other via a phosphodiester linkage. In some embodiments, “nucleic acid” refers to individual nucleic acid residues (e.g. nucleotides and/or nucleosides). In some embodiments, “nucleic acid” refers to an oligonucleotide chain comprising three or more individual nucleotide residues. As used herein, the terms “oligonucleotide”, “polynucleotide”, and “polynucleic acid” can be used interchangeably to refer to a polymer of nucleotides (e.g., a string of at least three nucleotides). In some embodiments, “nucleic acid” encompasses RNA as well as single and/or double-stranded DNA. Nucleic acids can be naturally occurring, for example, in the context of a genome, a transcript, mRNA, tRNA, rRNA, siRNA, snRNA, a plasmid, cosmid, chromosome, chromatid, or other naturally occurring nucleic acid molecules. On the other hand, a nucleic acid molecule can be a non-naturally occurring molecule, e.g., a recombinant DNA or RNA, an artificial chromosome, an engineered genome, or fragment thereof, or a synthetic DNA, RNA, DNA/RNA hybrid, or including non-naturally occurring nucleotides or nucleosides. Furthermore, the terms “nucleic acid”, “DNA”, “RNA”, and/or similar terms include nucleic acid analogs, e.g., analogs having other than a phosphodiester backbone. Nucleic acids can be purified from natural sources, produced using recombinant expression systems and optionally purified, chemically synthesized, etc. Where appropriate, e.g., in the case of chemically synthesized molecules, nucleic acids can comprise nucleoside analogs such as analogs having chemically modified bases or sugars, and backbone modifications. A nucleic acid sequence is presented in the 5′ to 3′ direction unless otherwise indicated. In some embodiments, a nucleic acid is or comprises natural nucleosides (e.g. adenosine, thymidine, guanosine, cytidine, uridine, deoxyadenosine, deoxythymidine, deoxyguanosine, and deoxycytidine); nucleoside analogs (e.g., 2-aminoadenosine, 2-thiothymidine, inosine, pyrrolopyrimidine, 3-methyl adenosine, 5-methylcytidine, 2-aminoadenosine, C5-bromouridine, C5-fluorouridine, C5-iodouridine, C5-propynyl-uridine, C5-propynyl-cytidine, C5-methylcytidine, 2-aminoadenosine, 7-deazaadenosine, 7-deazaguanosine, 8-oxoadenosine, 8-oxoguanosine, O⁶-methylguanine, and 2-thiocytidine); chemically modified bases; biologically modified bases (e.g., methylated bases); intercalated bases; modified sugars (e.g., 2′-fluororibose, ribose, 2′-deoxyribose, arabinose, and hexose); and/or modified phosphate groups (e.g., phosphorothioates and 5′-N-phosphoramidite linkages).

[0112] The term “nucleic acid programmable DNA binding protein” or “napDNAbp” may be used interchangeably with “polynucleotide programmable nucleotide binding domain” to refer to a protein that associates with a nucleic acid (e.g., DNA or RNA), such as a guide nucleic acid, that guides the napDNAbp to a specific nucleic acid sequence. For example, a Cas9 protein can associate with a guide RNA that guides the Cas9 protein to a specific DNA sequence that is complementary to the guide RNA. In some embodiments, the napDNAbp is a Cas9 domain, for example a nuclease active Cas9, a Cas9 nickase (nCas9), or a nuclease inactive Cas9 (dCas9). Examples of nucleic acid programmable DNA binding proteins include, without limitation, Cas9 (e.g., dCas9 and nCas9), Cas12a/Cpf1, Cas12b/C2c1, Cas12c/C2c3, Cas12d/CasY, Cas12e/CasX, Cas12g, Cas12h, and Cas12i. Other nucleic acid programmable DNA binding proteins are also within the scope of this disclosure, although they may not be specifically listed in this disclosure. See, e.g., Makarova et al. “Classification and Nomenclature of CRISPR-Cas Systems: Where from Here?” CRISPR J. 2018 October; 1:325-336. doi: 10.1089/crispr.2018.0033; Yan et al., “Functionally diverse type V CRISPR-Cas systems” Science. 2019 Jan. 4; 363(6422):88-91. doi: 10.1126/science.aav7271, the entire contents of each are hereby incorporated by reference.

[0113] The terms “nucleobase editing domain” or “nucleobase editing protein”, as used herein, refers to a protein or enzyme that can catalyze a nucleobase modification in RNA or DNA, such as cytosine (or cytidine) to uracil (or uridine) or thymine (or thymidine), and adenine (or adenosine) to hypoxanthine (or inosine) deaminations, as well as non-templated nucleotide additions and insertions. In some embodiments, the nucleobase editing domain is a deaminase domain (e.g., a cytidine deaminase, a cytosine deaminase, an adenine deaminase, or an adenosine deaminase). In some embodiments, the nucleobase editing domain can be a naturally occurring nucleobase editing domain. In some embodiments, the nucleobase editing domain can be an engineered or evolved nucleobase editing domain from the naturally occurring nucleobase editing domain. The nucleobase editing domain can be from any organism, such as a bacterium, human, chimpanzee, gorilla, monkey, cow, dog, rat, or mouse. For example, nucleobase editing proteins are described in International PCT Application Nos. PCT/2017/045381 (WO2018/027078) and PCT/US2016/058344 (WO2017/070632), each of which is incorporated herein by reference for its entirety. Also see Komor, A. C., et al., “Programmable editing of a target base in genomic DNA without double-stranded DNA cleavage” Nature 533, 420-424 (2016); Gaudelli, N. M., et al., “Programmable base editing of A⋅T to G⋅C in genomic DNA without DNA cleavage” Nature 551, 464-471 (2017); and Komor, A C., et al., “Improved base excision repair inhibition and bacteriophage Mu Gam protein yields C:G-to-T:A base editors with higher efficiency and product purity” Science Advances 3:eaao4774 (2017), the entire contents of which are hereby incorporated by reference.

[0114] As used herein, “obtaining” as in “obtaining an agent” includes synthesizing, purchasing, or otherwise acquiring the agent.

[0115] A “patient” or “subject” as used herein refers to a mammalian subject or individual diagnosed with, at risk of having or developing, or suspected of having or developing a disease or a disorder. In some embodiments, the term “patient” refers to a mammalian subject with a higher than average likelihood of developing a disease or a disorder. Exemplary patients can be humans, non-human primates, cats, dogs, pigs, cattle, cats, horses, camels, llamas, goats, sheep, rodents (e.g., mice, rabbits, rats, or guinea pigs) and other mammalians that can benefit from the therapies disclosed herein. Exemplary human patients can be male and/or female.

[0116] “Patient in need thereof” or “subject in need thereof” is referred to herein as a patient diagnosed with or suspected of having a disease or disorder, for instance, but not restricted to alpha-1 antitrypsin deficiency (A1AD).

[0117] The terms “pathogenic mutation”, “pathogenic variant”, “disease casing mutation”, “disease causing variant”, “deleterious mutation”, or “predisposing mutation” refers to a genetic alteration or mutation that increases an individual's susceptibility or predisposition to a certain disease or disorder. In some embodiments, the pathogenic mutation comprises at least one wild-type amino acid substituted by at least one pathogenic amino acid in a protein encoded by a gene.

[0118] The terms “protein”, “peptide”, “polypeptide”, and their grammatical equivalents are used interchangeably herein, and refer to a polymer of amino acid residues linked together by peptide (amide) bonds. The terms refer to a protein, peptide, or polypeptide of any size, structure, or function. Typically, a protein, peptide, or polypeptide will be at least three amino acids long. A protein, peptide, or polypeptide can refer to an individual protein or a collection of proteins. One or more of the amino acids in a protein, peptide, or polypeptide can be modified, for example, by the addition of a chemical entity such as a carbohydrate group, a hydroxyl group, a phosphate group, a farnesyl group, an isofarnesyl group, a fatty acid group, a linker for conjugation, functionalization, or other modifications, etc. A protein, peptide, or polypeptide can also be a single molecule or can be a multi-molecular complex. A protein, peptide, or polypeptide can be just a fragment of a naturally occurring protein or peptide. A protein, peptide, or polypeptide can be naturally occurring, recombinant, or synthetic, or any combination thereof. The term “fusion protein” as used herein refers to a hybrid polypeptide which comprises protein domains from at least two different proteins. One protein can be located at the amino-terminal (N-terminal) portion of the fusion protein or at the carboxy-terminal (C-terminal) protein thus forming an amino-terminal fusion protein or a carboxy-terminal fusion protein, respectively. A protein can comprise different domains, for example, a nucleic acid binding domain (e.g., the gRNA binding domain of Cas9 that directs the binding of the protein to a target site) and a nucleic acid cleavage domain, or a catalytic domain of a nucleic acid editing protein. In some embodiments, a protein comprises a proteinaceous part, e.g., an amino acid sequence constituting a nucleic acid binding domain, and an organic compound, e.g., a compound that can act as a nucleic acid cleavage agent. In some embodiments, a protein is in a complex with, or is in association with, a nucleic acid, e.g., RNA or DNA. Any of the proteins provided herein can be produced by any method known in the art. For example, the proteins provided herein can be produced via recombinant protein expression and purification, which is especially suited for fusion proteins comprising a peptide linker. Methods for recombinant protein expression and purification are well known, and include those described by Green and Sambrook, Molecular Cloning: A Laboratory Manual (4th ed., Cold Spring Harbor Laboratory Press, Cold Spring Harbor, N.Y. (2012)), the entire contents of which are incorporated herein by reference.

[0119] Polypeptides and proteins disclosed herein (including functional portions and functional variants thereof) can comprise synthetic amino acids in place of one or more naturally-occurring amino acids. Such synthetic amino acids are known in the art, and include, for example, aminocyclohexane carboxylic acid, norleucine, α-amino n-decanoic acid, homoserine, S-acetylaminomethyl-cysteine, trans-3- and trans-4-hydroxyproline, 4-aminophenylalanine, 4-nitrophenylalanine, 4-chlorophenylalanine, 4-carboxyphenylalanine, β-phenylserine β-hydroxyphenylalanine, phenylglycine, α-naphthylalanine, cyclohexylalanine, cyclohexylglycine, indoline-2-carboxylic acid, 1,2,3,4-tetrahydroisoquinoline-3-carboxylic acid, aminomalonic acid, aminomalonic acid monoamide, N′-benzyl-N′-methyl-lysine, N′,N′-dibenzyl-lysine, 6-hydroxylysine, ornithine, α-aminocyclopentane carboxylic acid, α-aminocyclohexane carboxylic acid, α-aminocycloheptane carboxylic acid, α-(2-amino-2-norbornane)-carboxylic acid, α,γ-diaminobutyric acid, α,β-diaminopropionic acid, homophenylalanine, and α-tert-butylglycine. The polypeptides and proteins can be associated with post-translational modifications of one or more amino acids of the polypeptide constructs. Non-limiting examples of post-translational modifications include phosphorylation, acylation including acetylation and formylation, glycosylation (including N-linked and O-linked), amidation, hydroxylation, alkylation including methylation and ethylation, ubiquitylation, addition of pyrrolidone carboxylic acid, formation of disulfide bridges, sulfation, myristoylation, palmitoylation, isoprenylation, farnesylation, geranylation, glypiation, lipoylation and iodination.

[0120] The term “polynucleotide programmable nucleotide binding domain” refers to a protein that associates with a nucleic acid (e.g., DNA or RNA), such as a guide polynucleotide (e.g., guide RNA), that guides the polynucleotide programmable DNA binding domain to a specific nucleic acid sequence. In some embodiments, the polynucleotide programmable nucleotide binding domain is a polynucleotide programmable DNA binding domain. In some embodiments, the polynucleotide programmable nucleotide binding domain is a polynucleotide programmable RNA binding domain. In some embodiments, the polynucleotide programmable nucleotide binding domain is a Cas9 protein. A Cas9 protein can associate with a guide RNA that guides the Cas9 protein to a specific DNA sequence that has complementary to the guide RNA. In some embodiments, the polynucleotide programmable nucleotide binding domain is a Cas9 domain, for example a nuclease active Cas9, a Cas9 nickase (nCas9), or a nuclease inactive Cas9 (dCas9). Non-limiting examples of nucleic acid programmable DNA binding proteins include Cas9 (e.g., dCas9 and nCas9), Cas12a/Cpf1, Cas12b/C2c1, and Cas12c/C2c3, Cas12d/CasY, Cas12e/CasX, Cas12g, Cas12h, and Cas12i. Non-limiting examples of Cas enzymes include Cas1, Cas1B, Cas2, Cas3, Cas4, Cas5, Cas5d, Cas5t, Cas5h, Cas5a, Cas6, Cas7, Cas8, Cas8a, Cas8b, Cas8c, Cas9 (also known as Csn1 or Csx12), Cas10, Cas10d, Cas12a/Cpf1, Cas12b/C2c1, Cas12c/C2c3, Cas12d/CasY, Cas12e/CasX, Cas12g, Cas12h, Cas12i, Csy1, Csy2, Csy3, Csy4, Cse1, Cse2, Cse3, Cse4, Cse5e, Csc1, Csc2, Csa5, Csn1, Csn2, Csm1, Csm2, Csm3, Csm4, Csm5, Csm6, Cmr1, Cmr3, Cmr4, Cmr5, Cmr6, Csb1, Csb2, Csb3, Csx17, Csx14, Csx10, Csx16, CsaX, Csx3, Csx1, Csx1S, Csx11, Csf1, Csf2, CsO, Csf4, Csd1, Csd2, Cst1, Cst2, Csh1, Csh2, Csa1, Csa2, Csa3, Csa4, Csa5, Type II Cas effector proteins, Type V Cas effector proteins, Type VI Cas effector proteins, CARF, DinG, homologues thereof, or modified or engineered versions thereof. Other nucleic acid programmable DNA binding proteins are also within the scope of this disclosure, though they are not specifically listed in this disclosure.

[0121] The term “recombinant” as used herein in the context of proteins or nucleic acids refers to proteins or nucleic acids that do not occur in nature, but are the product of human engineering. For example, in some embodiments, a recombinant protein or nucleic acid molecule comprises an amino acid or nucleotide sequence that comprises at least one, at least two, at least three, at least four, at least five, at least six, or at least seven mutations as compared to any naturally occurring sequence.

[0122] By “reduces” is meant a negative alteration of at least 10%, 25%, 50%, 75%, or 100%.

[0123] By “reference” is meant a standard or control condition. In one embodiment, the reference is a wild-type or healthy cell.

[0124] A “reference sequence” is a defined sequence used as a basis for sequence comparison. A reference sequence may be a subset of or the entirety of a specified sequence; for example, a segment of a full-length cDNA or gene sequence, or the complete cDNA or gene sequence. For polypeptides, the length of the reference polypeptide sequence will generally be at least about 16 amino acids, preferably at least about 20 amino acids, more preferably at least about 25 amino acids, and even more preferably about 35 amino acids, about 50 amino acids, or about 100 amino acids. For nucleic acids, the length of the reference nucleic acid sequence will generally be at least about 50 nucleotides, preferably at least about 60 nucleotides, more preferably at least about 75 nucleotides, and even more preferably about 100 nucleotides or about 300 nucleotides or any integer thereabout or therebetween.

[0125] The term “RNA-programmable nuclease,” and “RNA-guided nuclease” are used with (e.g., binds or associates with) one or more RNA(s) that is not a target for cleavage. In some embodiments, an RNA-programmable nuclease, when in a complex with an RNA, may be referred to as a nuclease:RNA complex. Typically, the bound RNA(s) is referred to as a guide RNA (gRNA). gRNAs can exist as a complex of two or more RNAs, or as a single RNA molecule. gRNAs that exist as a single RNA molecule may be referred to as single-guide RNAs (sgRNAs), though “gRNA” is used interchangeably to refer to guide RNAs that exist as either single molecules or as a complex of two or more molecules. Typically, gRNAs that exist as single RNA species comprise two domains: (1) a domain that shares homology to a target nucleic acid (e.g., and directs binding of a Cas9 complex to the target); and (2) a domain that binds a Cas9 protein. In some embodiments, domain (2) corresponds to a sequence known as a tracrRNA, and comprises a stem-loop structure. For example, in some embodiments, domain (2) is identical or homologous to a tracrRNA as provided in Jinek et al., Science 337:816-821(2012), the entire contents of which is incorporated herein by reference. Other examples of gRNAs (e.g., those including domain 2) can be found in U.S. Provisional Patent Application, U.S. Ser. No. 61/874,682, filed Sep. 6, 2013, entitled “Switchable Cas9 Nucleases and Uses Thereof,” and U.S. Provisional Patent Application, U.S. Ser. No. 61/874,746, filed Sep. 6, 2013, entitled “Delivery System For Functional Nucleases,” the entire contents of each are hereby incorporated by reference in their entirety. In some embodiments, a gRNA comprises two or more of domains (1) and (2), and may be referred to as an “extended gRNA.” For example, an extended gRNA will, e.g., bind two or more Cas9 proteins and bind a target nucleic acid at two or more distinct regions, as described herein. The gRNA comprises a nucleotide sequence that complements a target site, which mediates binding of the nuclease/RNA complex to said target site, providing the sequence specificity of the nuclease:RNA complex. In some embodiments, the RNA-programmable nuclease is the (CRISPR-associated system) Cas9 endonuclease, for example, Cas9 (Csn1) from Streptococcus pyogenes (See, e.g., “Complete genome sequence of an M1 strain of Streptococcus pyogenes.” Ferretti J. J., McShan W. M., Ajdic D. J., Savic D. J., Savic G., Lyon K., Primeaux C, Sezate S., Suvorov A. N., Kenton S., Lai H. S., Lin S. P., Qian Y., Jia H. G., Najar F. Z., Ren Q., Zhu H., Song L., White J., Yuan X., Clifton S. W., Roe B. A., McLaughlin R. E., Proc. Natl. Acad. Sci. U.S.A. 98:4658-4663(2001); “CRISPR RNA maturation by trans-encoded small RNA and host factor RNase III.” Deltcheva E., Chylinski K., Sharma C M., Gonzales K., Chao Y., Pirzada Z. A., Eckert M. R., Vogel J., Charpentier E., Nature 471:602-607(2011).

[0126] The term “single nucleotide polymorphism (SNP)” is a variation in a single nucleotide that occurs at a specific position in the genome, where each variation is present to some appreciable degree within a population (e.g. >1%). For example, at a specific base position in the human genome, the C nucleotide can appear in most individuals, but in a minority of individuals, the position is occupied by an A. This means that there is a SNP at this specific position, and the two possible nucleotide variations, C or A, are said to be alleles for this position. SNPs underlie differences in susceptibility to disease. The severity of illness and the way our body responds to treatments are also manifestations of genetic variations. SNPs can fall within coding regions of genes, non-coding regions of genes, or in the intergenic regions (regions between genes). In some embodiments, SNPs within a coding sequence do not necessarily change the amino acid sequence of the protein that is produced, due to degeneracy of the genetic code. SNPs in the coding region are of two types: synonymous and nonsynonymous SNPs. Synonymous SNPs do not affect the protein sequence, while nonsynonymous SNPs change the amino acid sequence of protein. The nonsynonymous SNPs are of two types: missense and nonsense. SNPs that are not in protein-coding regions can still affect gene splicing, transcription factor binding, messenger RNA degradation, or the sequence of noncoding RNA. Gene expression affected by this type of SNP is referred to as an eSNP (expression SNP) and can be upstream or downstream from the gene. A single nucleotide variant (SNV) is a variation in a single nucleotide without any limitations of frequency and can arise in somatic cells. A somatic single nucleotide variation (e.g., caused by cancer) can also be called a single-nucleotide alteration.

[0127] By “SERPINA1 polynucleotide” is meant a nucleic acid molecule encoding an A1AT protein or fragment thereof. The sequence of an exemplary SERPINA1 polynucleotide, which is available at NCBI Accession NO. NM_000295, is provided below:

```
(SEQ ID NO: 47)
      1 acaatgactc ctttcggtaa gtgcagtgga agctgtacac tgcccaggca aagcgtccgg
    61 gcagcgtagg cgggcgactc agatcccagc cagtggactt agcccctgtt tgctcctccg
  121 ataactgggg tgaccttggt taatattcac cagcagcctc ccccgttgcc cctctggatc
  181 cactgcttaa atacggacga ggacagggcc ctgtctcctc agcttcaggc accaccactg
  241 acctgggaca gtgaatcgac aatgccgtct tctgtctcgt ggggcatcct cctgctggca
  301 ggcctgtgct gcctggtccc tgtctccctg gctgaggatc cccagggaga tgctgcccag
  361 aagacagata catcccacca tgatcaggat cacccaacct tcaacaagat cacccccaac
  421 ctggctgagt tcgccttcag cctataccgc cagctggcac accagtccaa cagcaccaat
  481 atcttcttct ccccagtgag catcgctaca gcctttgcaa tgctctccct ggggaccaag
  541 gctgacactc acgatgaaat cctggagggc ctgaatttca acctcacgga gattccggag
  601 gctcagatcc atgaaggctt ccaggaactc ctccgtaccc tcaaccagcc agacagccag
  661 ctccagctga ccaccggcaa tggcctgttc ctcagcgagg gcctgaagct agtggataag
  721 tttttggagg atgttaaaaa gttgtaccac tcagaagcct tcactgtcaa cttcggggac
  781 accgaagagg ccaagaaaca gatcaacgat tacgtggaga agggtactca agggaaaatt
  841 gtggatttgg tcaaggagct tgacagagac acagtttttg ctctggtgaa ttacatcttc
  901 tttaaaggca aatgggagag accctttgaa gtcaaggaca ccgaggaaga ggacttccac
  961 gtggaccagg tgaccaccgt gaaggtgcct atgatgaagc gtttaggcat gtttaacatc
1021 cagcactgta agaagctgtc cagctgggtg ctgctgatga aatacctggg caatgccacc
1081 gccatcttct tcctgcctga tgaggggaaa ctacagcacc tggaaaatga actcacccac
1141 gatatcatca ccaagttcct ggaaaatgaa gacagaaggt ctgccagctt acatttaccc
1201 aaactgtcca ttactggaac ctatgatctg aagagcgtcc tgggtcaact gggcatcact
1261 aaggtcttca gcaatggggc tgacctctcc ggggtcacag aggaggcacc cctgaagctc
1321 tccaaggccg tgcataaggc tgtgctgacc atcgacgaga aagggactga agctgctggg
1381 gccatgtttt tagaggccat acccatgtct atcccccccg aggtcaagtt caacaaaccc
1441 tttgtcttct taatgattga acaaaatacc aagtctcccc tcttcatggg aaaagtggtg
1501 aatcccaccc aaaaataact gcctctcgct cctcaacccc tcccctccat ccctggcccc
1561 ctccctggat gacattaaag aagggttgag ctggtccctg cctgcatgtg actgtaaatc
1621 cctcccatgt tttctctgag tctccctttg cctgctgagg ctgtatgtgg gctccaggta
1681 acagtgctgt cttcgggccc cctgaactgt gttcatggag catctggctg ggtaggcaca
1741 tgctgggctt gaatccaggg gggactgaat cctcagctta cggacctggg cccatctgtt
1801 tctggagggc tccagtcttc cttgtcctgt cttggagtcc ccaagaagga atcacagggg
1861 aggaaccaga taccagccat gaccccaggc tccaccaagc atcttcatgt ccccctgctc
1921 atcccccact cccccccacc cagagttgct catcctgcca gggctggctg tgcccacccc
1981 aaggctgccc tcctgggggc cccagaactg cctgatcgtg ccgtggccca gttttgtggc
2041 atctgcagca acacaagaga gaggacaatg tcctcctctt gacccgctgt cacctaacca
2101 gactcgggcc ctgcacctct caggcacttc tggaaaatga ctgaggcaga ttcttcctga
2161 agcccattct ccatggggca acaaggacac ctattctgtc cttgtccttc catcgctgcc
2221 ccagaaagcc tcacatatct ccgtttagaa tcaggtccct tctccccaga tgaagaggag
2281 ggtctctgct ttgttttctc tatctcctcc tcagacttga ccaggcccag caggccccag
2341 aagaccatta ccctatatcc cttctcctcc ctagtcacat ggccataggc ctgctgatgg
2401 ctcaggaagg ccattgcaag gactcctcag ctatgggaga ggaagcacat cacccattga
2461 cccccgcaac ccctcccttt cctcctctga gtcccgactg gggccacatg cagcctgact
2521 tctttgtgcc tgttgctgtc cctgcagtct tcagagggcc accgcagctc cagtgccacg
2581 gcaggaggct gttcctgaat agcccctgtg gtaagggcca ggagagtcct tccatcctcc
2641 aaggccctgc taaaggacac agcagccagg aagtcccctg ggcccctagc tgaaggacag
2701 cctgctccct ccgtctctac caggaatggc cttgtcctat ggaaggcact gccccatccc
2761 aaactaatct aggaatcact gtctaaccac tcactgtcat gaatgtgtac ttaaaggatg
2821 aggttgagtc ataccaaata gtgatttcga tagttcaaaa tggtgaaatt agcaattcta
2881 catgattcag tctaatcaat ggataccgac tgtttcccac acaagtctcc tgttctctta
2941 agcttactca ctgacagcct ttcactctcc acaaatacat taaagatatg gccatcacca
3001 agccccctag gatgacacca gacctgagag tctgaagacc tggatccaag ttctgacttt
3061 tccccctgac agctgtgtga ccttcgtgaa gtcgccaaac ctctctgagc cccagtcatt
3121 gctagtaaga cctgcctttg agttggtatg atgttcaagt tagataacaa aatgtttata
3181 cccattagaa cagagaataa atagaactac atttcttgca
```

The PAM sequence is shown in italics and double underlining, and the correct sequence after adenosine base editing is shown.

[0128] By “specifically binds” is meant a nucleic acid molecule, polypeptide, or complex thereof (e.g., a nucleic acid programmable DNA binding domain and guide nucleic acid), compound, or molecule that recognizes and binds a polypeptide and/or nucleic acid molecule of the invention, but which does not substantially recognize and bind other molecules in a sample, for example, a biological sample.

[0129] Nucleic acid molecules useful in the methods of the invention include any nucleic acid molecule that encodes a polypeptide of the invention or a fragment thereof. Such nucleic acid molecules need not be 100% identical with an endogenous nucleic acid sequence, but will typically exhibit substantial identity. Polynucleotides having “substantial identity” to an endogenous sequence are typically capable of hybridizing with at least one strand of a double-stranded nucleic acid molecule. Nucleic acid molecules useful in the methods of the invention include any nucleic acid molecule that encodes a polypeptide of the invention or a fragment thereof. Such nucleic acid molecules need not be 100% identical with an endogenous nucleic acid sequence, but will typically exhibit substantial identity. Polynucleotides having “substantial identity” to an endogenous sequence are typically capable of hybridizing with at least one strand of a double-stranded nucleic acid molecule. By “hybridize” is meant pair to form a double-stranded molecule between complementary polynucleotide sequences (e.g., a gene described herein), or portions thereof, under various conditions of stringency. (See, e.g., Wahl, G. M. and S. L. Berger (1987) Methods Enzymol. 152:399; Kimmel, A. R. (1987) Methods Enzymol. 152:507).

[0130] For example, stringent salt concentration will ordinarily be less than about 750 mM NaCl and 75 mM trisodium citrate, preferably less than about 500 mM NaCl and 50 mM trisodium citrate, and more preferably less than about 250 mM NaCl and 25 mM trisodium citrate. Low stringency hybridization can be obtained in the absence of organic solvent, e.g., formamide, while high stringency hybridization can be obtained in the presence of at least about 35% formamide, and more preferably at least about 50% formamide. Stringent temperature conditions will ordinarily include temperatures of at least about 30° C., more preferably of at least about 37° C., and most preferably of at least about 42° C. Varying additional parameters, such as hybridization time, the concentration of detergent, e.g., sodium dodecyl sulfate (SDS), and the inclusion or exclusion of carrier DNA, are well known to those skilled in the art. Various levels of stringency are accomplished by combining these various conditions as needed. In a preferred: embodiment, hybridization will occur at 30° C. in 750 mM NaCl, 75 mM trisodium citrate, and 1% SDS. In a more preferred embodiment, hybridization will occur at 37° C. in 500 mM NaCl, 50 mM trisodium citrate, 1% SDS, 35% formamide, and 100 μg/ml denatured salmon sperm DNA (ssDNA). In a most preferred embodiment, hybridization will occur at 42° C. in 250 mM NaCl, 25 mM trisodium citrate, 1% SDS, 50% formamide, and 200 μg/ml ssDNA. Useful variations on these conditions will be readily apparent to those skilled in the art.

[0131] For most applications, washing steps that follow hybridization will also vary in stringency. Wash stringency conditions can be defined by salt concentration and by temperature. As above, wash stringency can be increased by decreasing salt concentration or by increasing temperature. For example, stringent salt concentration for the wash steps will preferably be less than about 30 mM NaCl and 3 mM trisodium citrate, and most preferably less than about 15 mM NaCl and 1.5 mM trisodium citrate. Stringent temperature conditions for the wash steps will ordinarily include a temperature of at least about 25° C., more preferably of at least about 42° C., and even more preferably of at least about 68° C. In a preferred embodiment, wash steps will occur at 25° C. in 30 mM NaCl, 3 mM trisodium citrate, and 0.1% SDS. In a more preferred embodiment, wash steps will occur at 42 C in 15 mM NaCl, 1.5 mM trisodium citrate, and 0.1% SDS. In a more preferred embodiment, wash steps will occur at 68° C. in 15 mM NaCl, 1.5 mM trisodium citrate, and 0.1% SDS. Additional variations on these conditions will be readily apparent to those skilled in the art. Hybridization techniques are well known to those skilled in the art and are described, for example, in Benton and Davis (Science 196:180, 1977); Grunstein and Hogness (Proc. Natl. Acad. Sci., USA 72:3961, 1975); Ausubel et al. (Current Protocols in Molecular Biology, Wiley Interscience, New York, 2001); Berger and Kimmel (Guide to Molecular Cloning Techniques, 1987, Academic Press, New York); and Sambrook et al., Molecular Cloning: A Laboratory Manual, Cold Spring Harbor Laboratory Press, New York.

[0132] By “substantially identical” is meant a polypeptide or nucleic acid molecule exhibiting at least 50% identity to a reference amino acid sequence (for example, any one of the amino acid sequences described herein) or nucleic acid sequence (for example, any one of the nucleic acid sequences described herein). Preferably, such a sequence is at least 60%, more preferably 80% or 85%, and more preferably 90%, 95% or even 99% identical at the amino acid level or nucleic acid to the sequence used for comparison.

[0133] Sequence identity is typically measured using sequence analysis software (for example, Sequence Analysis Software Package of the Genetics Computer Group, University of Wisconsin Biotechnology Center, 1710 University Avenue, Madison, Wis. 53705, BLAST, BESTFIT, GAP, or PILEUP/PRETTYBOX programs). Such software matches identical or similar sequences by assigning degrees of homology to various substitutions, deletions, and/or other modifications. Conservative substitutions typically include substitutions within the following groups: glycine, alanine; valine, isoleucine, leucine; aspartic acid, glutamic acid, asparagine, glutamine; serine, threonine; lysine, arginine; and phenylalanine, tyrosine. In an exemplary approach to determining the degree of identity, a BLAST program may be used, with a probability score between e⁻³ and e⁻¹⁰⁰ indicating a closely related sequence. COBALT is used, for example, with the following parameters:
[0134] a) alignment parameters: Gap penalties-11, -1 and End-Gap penalties-5, -1,
[0135] b) CDD Parameters: Use RPS BLAST on; Blast E-value 0.003; Find Conserved columns and Recompute on, and
[0136] c) Query Clustering Parameters: Use query clusters on; Word Size 4; Max cluster distance 0.8; Alphabet Regular.
   EMBOSS Needle is used, for example, with the following parameters:
[0137] a) Matrix: BLOSUM62;
[0138] b) GAP OPEN: 10;
[0139] c) GAP EXTEND: 0.5;
[0140] d) OUTPUT FORMAT: pair;
[0141] e) END GAP PENALTY: false;
[0142] f) END GAP OPEN: 10; and
[0143] g) END GAP EXTEND: 0.5.

[0144] By “subject” is meant a mammal, including, but not limited to, a human or non-human mammal, such as a bovine, equine, canine, ovine, or feline.

[0145] The term “target site” refers to a sequence within a nucleic acid molecule that is modified by a nucleobase editor. In one embodiment, the target site is deaminated by a deaminase or a fusion protein comprising a deaminase (e.g., a cytidine or an adenine deaminase).

[0146] Because RNA-programmable nucleases (e.g., Cas9) use RNA:DNA hybridization to target DNA cleavage sites, these proteins are able to be targeted, in principle, to any sequence specified by the guide RNA. Methods of using RNA-programmable nucleases, such as Cas9, for site-specific cleavage (e.g., to modify a genome) are known in the art (see e.g., Cong, L. et ah, Multiplex genome engineering using CRISPR/Cas systems. Science 339, 819-823 (2013); Mali, P. et ah, RNA-guided human genome engineering via Cas9. Science 339, 823-826 (2013); Hwang, W. Y. et ah, Efficient genome editing in zebrafish using a CRISPR-Cas system. Nature biotechnology 31, 227-229 (2013); Jinek, M. et ah, RNA-programmed genome editing in human cells. eLife 2, e00471 (2013); Dicarlo, J. E. et ah, Genome engineering in Saccharomyces cerevisiae using CRISPR-Cas systems. Nucleic acids research (2013); Jiang, W. et ah RNA-guided editing of bacterial genomes using CRISPR-Cas systems. Nature biotechnology 31, 233-239 (2013); the entire contents of each of which are incorporated herein by reference).

[0147] As used herein, the terms “treat,” treating,” “treatment,” and the like refer to reducing or ameliorating a disorder and/or symptoms associated therewith or obtaining a desired pharmacologic and/or physiologic effect. It will be appreciated that, although not precluded, treating a disorder or condition does not require that the disorder, condition or symptoms associated therewith be completely eliminated. In some embodiments, the effect is therapeutic, i.e., without limitation, the effect partially or completely reduces, diminishes, abrogates, abates, alleviates, decreases the intensity of, or cures a disease and/or adverse symptom attributable to the disease. In some embodiments, the effect is preventative, i.e., the effect protects or prevents an occurrence or reoccurrence of a disease or condition. To this end, the presently disclosed methods comprise administering a therapeutically effective amount of a compositions as described herein.

[0148] By “uracil glycosylase inhibitor” is meant an agent that inhibits the uracil-excision repair system. In one embodiment, the agent is a protein or fragment thereof that binds a host uracil-DNA glycosylase and prevents removal of uracil residues from DNA.

[0149] Ranges provided herein are understood to be shorthand for all of the values within the range. For example, a range of 1 to 50 is understood to include any number, combination of numbers, or sub-range from the group consisting 1, 2, 3, 4, 5, 6, 7, 8, 9, 10, 11, 12, 13, 14, 15, 16, 17, 18, 19, 20, 21, 22, 23, 24, 25, 26, 27, 28, 29, 30, 31, 32, 33, 34, 35, 36, 37, 38, 39, 40, 41, 42, 43, 44, 45, 46, 47, 48, 49, or 50.

[0150] The recitation of a listing of chemical groups in any definition of a variable herein includes definitions of that variable as any single group or combination of listed groups. The recitation of an embodiment for a variable or aspect herein includes that embodiment as any single embodiment or in combination with any other embodiments or portions thereof.

[0151] Any compositions or methods provided herein can be combined with one or more of any of the other compositions and methods provided herein.

[0152] DNA editing has emerged as a viable means to modify disease states by correcting pathogenic mutations at the genetic level. Until recently, all DNA editing platforms have functioned by inducing a DNA double strand break (DSB) at a specified genomic site and relying on endogenous DNA repair pathways to determine the product outcome in a semi-stochastic manner, resulting in complex populations of genetic products. Though precise, user-defined repair outcomes can be achieved through the homology directed repair (HDR) pathway, a number of challenges have prevented high efficiency repair using HDR in therapeutically-relevant cell types. In practice, this pathway is inefficient relative to the competing, error-prone non-homologous end joining pathway. Further, HDR is tightly restricted to the G1 and S phases of the cell cycle, preventing precise repair of DSBs in post-mitotic cells. As a result, it has proven difficult or impossible to alter genomic sequences in a user-defined, programmable manner with high efficiencies in these populations.

### Nucleobase Editor

[0153] Disclosed herein is a base editor or a nucleobase editor for editing, modifying or altering a target nucleotide sequence of a polynucleotide. Described herein is a nucleobase editor or a base editor comprising a polynucleotide programmable nucleotide binding domain and a nucleobase editing domain. A polynucleotide programmable nucleotide binding domain, when in conjunction with a bound guide polynucleotide (e.g., gRNA), can specifically bind to a target polynucleotide sequence (i.e., via complementary base pairing between bases of the bound guide nucleic acid and bases of the target polynucleotide sequence) and thereby localize the base editor to the target nucleic acid sequence desired to be edited. In some embodiments, the target polynucleotide sequence comprises single-stranded DNA or double-stranded DNA. In some embodiments, the target polynucleotide sequence comprises RNA. In some embodiments, the target polynucleotide sequence comprises a DNA-RNA hybrid.

### Polynucleotide Programmable Nucleotide Binding Domain

[0154] The term “polynucleotide programmable nucleotide binding domain” refers to a protein that associates with a nucleic acid (e.g., DNA or RNA), such as a guide polynucleotide (e.g., guide RNA), that guides the polynucleotide programmable nucleotide binding domain to a specific nucleic acid sequence. In some embodiments, the polynucleotide programmable nucleotide binding domain is a polynucleotide programmable DNA binding domain. In some embodiments, the polynucleotide programmable nucleotide binding domain is a polynucleotide programmable RNA binding domain. In some embodiments, the polynucleotide programmable nucleotide binding domain is a Cas9 protein. In some embodiments, the polynucleotide programmable nucleotide binding domain is a Cpf1 protein.

[0155] It should be appreciated that polynucleotide programmable nucleotide binding domains can also include nucleic acid programmable proteins that bind RNA. For example, the polynucleotide programmable nucleotide binding domain can be associated with a nucleic acid that guides the polynucleotide programmable nucleotide binding domain to an RNA. Other nucleic acid programmable DNA binding proteins are also within the scope of this disclosure, though they are not specifically listed in this disclosure.

[0156] A polynucleotide programmable nucleotide binding domain of a base editor can itself comprise one or more domains. For example, a polynucleotide programmable nucleotide binding domain can comprise one or more nuclease domains. In some embodiments, the nuclease domain of a polynucleotide programmable nucleotide binding domain can comprise an endonuclease or an exonuclease. Herein the term “exonuclease” refers to a protein or polypeptide capable of digesting a nucleic acid (e.g., RNA or DNA) from free ends, and the term “endonuclease” refers to a protein or polypeptide capable of catalyzing (e.g. cleaving) internal regions in a nucleic acid (e.g., DNA or RNA). In some embodiments, an endonuclease can cleave a single strand of a double-stranded nucleic acid. In some embodiments, an endonuclease can cleave both strands of a double-stranded nucleic acid molecule. In some embodiments a polynucleotide programmable nucleotide binding domain can be a deoxyribonuclease. In some embodiments a polynucleotide programmable nucleotide binding domain can be a ribonuclease.

[0157] In some embodiments, a nuclease domain of a polynucleotide programmable nucleotide binding domain can cut zero, one, or two strands of a target polynucleotide. In some cases, the polynucleotide programmable nucleotide binding domain can comprise a nickase domain. Herein the term “nickase” refers to a polynucleotide programmable nucleotide binding domain comprising a nuclease domain that is capable of cleaving only one strand of the two strands in a duplexed nucleic acid molecule (e.g. DNA). In some embodiments, a nickase can be derived from a fully catalytically active (e.g. natural) form of a polynucleotide programmable nucleotide binding domain by introducing one or more mutations into the active polynucleotide programmable nucleotide binding domain. For example, where a polynucleotide programmable nucleotide binding domain comprises a nickase domain derived from Cas9, the Cas9-derived nickase domain can include a D10A mutation and a histidine at position 840. In such cases, the residue H840 retains catalytic activity and can thereby cleave a single strand of the nucleic acid duplex. In another example, a Cas9-derived nickase domain can comprise an H840A mutation, while the amino acid residue at position 10 remains a D. In some embodiments, a nickase can be derived from a fully catalytically active (e.g. natural) form of a polynucleotide programmable nucleotide binding domain by removing all or a portion of a nuclease domain that is not required for the nickase activity. For example, where a polynucleotide programmable nucleotide binding domain comprises a nickase domain derived from Cas9, the Cas9-derived nickase domain can comprise a deletion of all or a portion of the RuvC domain or the HNH domain.

[0158] The amino acid sequence of an exemplary catalytically active Cas9 is as follows:

(SEQ ID NO: 48)
[sequence omitted]

[0159] A base editor comprising a polynucleotide programmable nucleotide binding domain comprising a nickase domain is thus able to generate a single-strand DNA break (nick) at a specific polynucleotide target sequence (e.g. determined by the complementary sequence of a bound guide nucleic acid). In some embodiments, the strand of a nucleic acid duplex target polynucleotide sequence that is cleaved by a base editor comprising a nickase domain (e.g. Cas9-derived nickase domain) is the strand that is not edited by the base editor (i.e., the strand that is cleaved by the base editor is opposite to a strand comprising a base to be edited). In other embodiments, a base editor comprising a nickase domain (e.g. Cas9-derived nickase domain) can cleave the strand of a DNA molecule which is being targeted for editing. In such cases, the non-targeted strand is not cleaved.

[0160] Also provided herein are base editors comprising a polynucleotide programmable nucleotide binding domain which is catalytically dead (i.e., incapable of cleaving a target polynucleotide sequence). Herein the terms “catalytically dead” and “nuclease dead” are used interchangeably to refer to a polynucleotide programmable nucleotide binding domain which has one or more mutations and/or deletions resulting in its inability to cleave a strand of a nucleic acid. In some embodiments, a catalytically dead polynucleotide programmable nucleotide binding domain base editor can lack nuclease activity as a result of specific point mutations in one or more nuclease domains. For example, in the case of a base editor comprising a Cas9 domain, the Cas9 can comprise both a D10A mutation and an H840A mutation. Such mutations inactivate both nuclease domains, thereby resulting in the loss of nuclease activity. In other embodiments, a catalytically dead polynucleotide programmable nucleotide binding domain can comprise one or more deletions of all or a portion of a catalytic domain (e.g. RuvC1 and/or HNH domains). In further embodiments, a catalytically dead polynucleotide programmable nucleotide binding domain comprises a point mutation (e.g. D10A or H840A) as well as a deletion of all or a portion of a nuclease domain.

[0161] Also contemplated herein are mutations capable of generating a catalytically dead polynucleotide programmable nucleotide binding domain from a previously functional version of the polynucleotide programmable nucleotide binding domain. For example, in the case of catalytically dead Cas9 (“dCas9”), variants having mutations other than D10A and H840A are provided, which result in nuclease inactivated Cas9. Such mutations, by way of example, include other amino acid substitutions at D10 and H840, or other substitutions within the nuclease domains of Cas9 (e.g., substitutions in the HNH nuclease subdomain and/or the RuvC1 subdomain). Additional suitable nuclease-inactive dCas9 domains can be apparent to those of skill in the art based on this disclosure and knowledge in the field, and are within the scope of this disclosure. Such additional exemplary suitable nuclease-inactive Cas9 domains include, but are not limited to, D10A/H840A, D10A/D839A/H840A, and D10A/D839A/H840A/N863A mutant domains (See, e.g., Prashant et al., CAS9 transcriptional activators for target specificity screening and paired nickases for cooperative genome engineering. Nature Biotechnology. 2013; 31(9): 833-838, the entire contents of which are incorporated herein by reference).

[0162] Non-limiting examples of a polynucleotide programmable nucleotide binding domain which can be incorporated into a base editor include a CRISPR protein-derived domain, a restriction nuclease, a meganuclease, TAL nuclease (TALEN), and a zinc finger nuclease (ZFN). In some cases, a base editor comprises a polynucleotide programmable nucleotide binding domain comprising a natural or modified protein or portion thereof which via a bound guide nucleic acid is capable of binding to a nucleic acid sequence during CRISPR (i.e., Clustered Regularly Interspaced Short Palindromic Repeats)-mediated modification of a nucleic acid. Such a protein is referred to herein as a “CRISPR protein”. Accordingly, disclosed herein is a base editor comprising a polynucleotide programmable nucleotide binding domain comprising all or a portion of a CRISPR protein (i.e. a base editor comprising as a domain all or a portion of a CRISPR protein, also referred to as a “CRISPR protein-derived domain” of the base editor). A CRISPR protein-derived domain incorporated into a base editor can be modified compared to a wild-type or natural version of the CRISPR protein. For example, as described below a CRISPR protein-derived domain can comprise one or more mutations, insertions, deletions, rearrangements and/or recombinations relative to a wild-type or natural version of the CRISPR protein.

[0163] CRISPR is an adaptive immune system that provides protection against mobile genetic elements (viruses, transposable elements and conjugative plasmids). CRISPR clusters contain spacers, sequences complementary to antecedent mobile elements, and target invading nucleic acids. CRISPR clusters are transcribed and processed into CRISPR RNA (crRNA). In type II CRISPR systems correct processing of pre-crRNA requires a trans-encoded small RNA (tracrRNA), endogenous ribonuclease 3 (mc) and a Cas9 protein. The tracrRNA serves as a guide for ribonuclease 3-aided processing of pre-crRNA. Subsequently, Cas9/crRNA/tracrRNA endonucleolytically cleaves linear or circular dsDNA target complementary to the spacer. The target strand not complementary to crRNA is first cut endonucleolytically, and then trimmed 3′-5′ exonucleolytically. In nature, DNA-binding and cleavage typically requires protein and both RNAs. However, single guide RNAs (“sgRNA”, or simply “gNRA”) can be engineered so as to incorporate aspects of both the crRNA and tracrRNA into a single RNA species. See, e.g., Jinek M., Chylinski K., Fonfara I., Hauer M., Doudna J. A., Charpentier E. Science 337:816-821(2012), the entire contents of which is hereby incorporated by reference. Cas9 recognizes a short motif in the CRISPR repeat sequences (the PAM or protospacer adjacent motif) to help distinguish self versus non-self.

[0164] In some embodiments, the methods described herein can utilize an engineered Cas protein. A guide RNA (gRNA) is a short synthetic RNA composed of a scaffold sequence necessary for Cas-binding and a user-defined ˜20 nucleotide spacer that defines the genomic target to be modified. Thus, a skilled artisan can change the genomic target of the Cas protein specificity is partially determined by how specific the gRNA targeting sequence is for the genomic target compared to the rest of the genome.

[0165] In some embodiments, the gRNA scaffold sequence is as follows: GUUUUAGAGC UAGAAAUAGC AAGUUAAAAU AAGGCUAGUC CGUUAUCAAC UUGAAAAAGU GGCACCGAGU CGGUGCUUUU (SEQ ID NO: 49).

[0166] In some embodiments, a CRISPR protein-derived domain incorporated into a base editor is an endonuclease (e.g., deoxyribonuclease or ribonuclease) capable of binding a target polynucleotide when in conjunction with a bound guide nucleic acid. In some embodiments, a CRISPR protein-derived domain incorporated into a base editor is a nickase capable of binding a target polynucleotide when in conjunction with a bound guide nucleic acid. In some embodiments, a CRISPR protein-derived domain incorporated into a base editor is a catalytically dead domain capable of binding a target polynucleotide when in conjunction with a bound guide nucleic acid. In some embodiments, a target polynucleotide bound by a CRISPR protein derived domain of a base editor is DNA. In some embodiments, a target polynucleotide bound by a CRISPR protein-derived domain of a base editor is RNA.

[0167] Cas proteins that can be used herein include class 1 and class 2. Non-limiting examples of Cas proteins include Cas1, Cas1B, Cas2, Cas3, Cas4, Cas5, Cas5d, Cas5t, Cas5h, Cas5a, Cas6, Cas7, Cas8, Cas9 (also known as Csn1 or Csx12), Cas10, Csy1, Csy2, Csy3, Csy4, Cse1, Cse2, Cse3, Cse4, Cse5e, Csc1, Csc2, Csa5, Csn1, Csn2, Csm1, Csm2, Csm3, Csm4, Csm5, Csm6, Cmr1, Cmr3, Cmr4, Cmr5, Cmr6, Csb1, Csb2, Csb3, Csx17, Csx14, Csx10, Csx16, CsaX, Csx3, Csx1, Csx1S, Csf1, Csf2, CsO, Csf4, Csd1, Csd2, Cst1, Cst2, Csh1, Csh2, Csa1, Csa2, Csa3, Csa4, Csa5, Cas12a/Cpf1, Cas12b/C2c1, Cas12c/C2c3, Cas12d/CasY, Cas12e/CasX, Cas12g, Cas12h, and Cas12i CARF, DinG, homologues thereof, or modified versions thereof. An unmodified CRISPR enzyme can have DNA cleavage activity, such as Cas9, which has two functional endonuclease domains: RuvC and HNH. A CRISPR enzyme can direct cleavage of one or both strands at a target sequence, such as within a target sequence and/or within a complement of a target sequence. For example, a CRISPR enzyme can direct cleavage of one or both strands within about 1, 2, 3, 4, 5, 6, 7, 8, 9, 10, 15, 20, 25, 50, 100, 200, 500, or more base pairs from the first or last nucleotide of a target sequence.

[0168] A vector that encodes a CRISPR enzyme that is mutated to with respect, to a corresponding wild-type enzyme such that the mutated CRISPR enzyme lacks the ability to cleave one or both strands of a target polynucleotide containing a target sequence can be used. Cas9 can refer to a polypeptide with at least or at least about 50%, 60%, 70%, 80%, 90%, 91%, 92%, 93%, 94%, 95%, 96%, 97%, 98%, 99%, or 100% sequence identity and/or sequence homology to a wild type exemplary Cas9 polypeptide (e.g., Cas9 from S. pyogenes). Cas9 can refer to a polypeptide with at most or at most about 50%, 60%, 70%, 80%, 90%, 91%, 92%, 93%, 94%, 95%, 96%, 97%, 98%, 99%, or 100% sequence identity and/or sequence homology to a wild type exemplary Cas9 polypeptide (e.g., from S. pyogenes). Cas9 can refer to the wild type or a modified form of the Cas9 protein that can comprise an amino acid change such as a deletion, insertion, substitution, variant, mutation, fusion, chimera, or any combination thereof.

[0169] In some embodiments, a CRISPR protein-derived domain of a base editor can include all or a portion of Cas9 from Corynebacterium ulcerans (NCBI Refs: NC_015683.1, NC_017317.1); Corynebacterium diphtheria (NCBI Refs: NC_016782.1, NC_016786.1); Spiroplasma syrphidicola (NCBI Ref: NC_021284.1); Prevotella intermedia (NCBI Ref: NC_017861.1); Spiroplasma taiwanense (NCBI Ref: NC_021846.1); Streptococcus iniae (NCBI Ref: NC_021314.1); Belliella baltica (NCBI Ref: NC_018010.1); Psychoflexus torquis (NCBI Ref: NC_018721.1); Streptococcus thermophilus (NCBI Ref: YP_820832.1); Listeria innocua (NCBI Ref: NP_472073.1); Campylobacter jejuni (NCBI Ref: YP_002344900.1); Neisseria meningitidis (NCBI Ref: YP_002342100.1), Streptococcus pyogenes, or Staphylococcus aureus.

### Cas9 Domains of Nucleobase Editors

[0170] The term “Cas9” or “Cas9 domain” refers to an RNA guided nuclease comprising a Cas9 protein, or a fragment thereof (e.g., a protein comprising an active, inactive, or partially active DNA cleavage domain of Cas9, and/or the gRNA binding domain of Cas9). A Cas9 nuclease is also referred to sometimes as a casn1 nuclease or a CRISPR (clustered regularly interspaced short palindromic repeat) associated nuclease. An exemplary Cas9, is Streptococcus pyogenes Cas9 (spCas9), the amino acid sequence of which is provided below:

(SEQ ID NO: 50)
MDKKYSIGLDIGTNSVGWAVITDDYKVPSKKFKVLGNTDRHSIKKNLIGA
LLFGSGETAEATRLKRTARRRYTRRKNRICYLQEIFSNEMAKVDDSFFHR
LEESFLVEEDKKHERHPIFGNIVDEVAYHEKYPTIYHLRKKLADSTDKAD
LRLIYLALAHMIKFRGHFLIEGDLNPDNSDVDKLFIQLVQIYNQLFEENP
INASRVDAKAILSARLSKSRRLENLIAQLPGEKRNGLFGNLIALSLGLTP
NFKSNFDLAEDAKLQLSKDTYDDDLDNLLAQIGDQYADLFLAAKNLSDAI
LLSDILRVNSEITKAPLSASMIKRYDEHHQDLTLLKALVRQQLPEKYKEI
FFDQSKNGYAGYIDGGASQEEFYKFIKPILEKMDGTEELLVKLNREDLLR
KQRTFDNGSIPHQIHLGELHAILRRQEDFYPFLKDNREKIEKILTFRIPY
YVGPLARGNSRFAWMTRKSEETITPWNFEEVVDKGASAQSFIERMTNFDK
NLPNEKVLPKHSLLYEYFTVYNELTKVKYVTEGMRKPAFLSGEQKKAIVD
LLFKTNRKVTVKQLKEDYFKKIECFDSVEISGVEDRFNASLGAYHDLLKI
IKDKDFLDNEENEDILEDIVLTLTLFEDRGMIEERLKTYAHLFDDKVMKQ
LKRRRYTGWGRLSRKLINGIRDKQSGKTILDFLKSDGFANRNFMQLIHDD
SLTFKEDIQKAQVSGQGHSLHEQIANLAGSPAIKKGILQTVKIVDELVKV
MGHKPENIVIEMARENQTTQKGQKNSRERMKRIEEGIKELGSQILKEHPV
ENTQLQNEKLYLYYLQNGRDMYVDQELDINRLSDYDVDHIVPQSFIKDDS
IDNKVLTRSDKNRGKSDNVPSEEVVKKMKNYWRQLLNAKLITQRKFDNLT
KAERGGLSELDKAGFIKRQLVETRQITKHVAQILDSRMNTKYDENDKLIR
EVKVITLKSKLVSDFRKDFQFYKVREINNYHHAHDAYLNAVVGTALIKKY
PKLESEFVYGDYKVYDVRKMIAKSEQEIGKATAKYFFYSNIMNFFKTEIT
LANGEIRKRPLIETNGETGEIVWDKGRDFATVRKVLSMPQVNIVKKTEVQ
TGGFSKESILPKRNSDKLIARKKDWDPKKYGGFDSPTVAYSVLVVAKVEK
GKSKKLKSVKELLGITIMERSSFEKNPIDFLEAKGYKEVKKDLIIKLPKY
SLFELENGRKRMLASAGELQKGNELALPSKYVNFLYLASHYEKLKGSPED
NEQKQLFVEQHKHYLDEIIEQISEFSKRVILADANLDKVLSAYNKHRDKP
IREQAENIIHLFTLTNLGAPAAFKYFDTTIDRKRYTSTKEVLDATLIHQS
ITGLYETRIDLSQLGGD
(single underline: HNH domain; double underline:
RuvC domain)

[0171] Cas9 nuclease sequences and structures are well known to those of skill in the art (See, e.g., “Complete genome sequence of an M1 strain of Streptococcus pyogenes.” Ferretti et al., J. J., McShan W. M., Ajdic D. J., Savic D. J., Savic G., Lyon K., Primeaux C, Sezate S., Suvorov A. N., Kenton S., Lai H. S., Lin S. P., Qian Y., Jia H. G., Najar F. Z., Ren Q., Zhu H., Song L., White J., Yuan X., Clifton S. W., Roe B. A., McLaughlin R. E., Proc. Natl. Acad. Sci. U.S.A. 98:4658-4663(2001); “CRISPR RNA maturation by trans-encoded small RNA and host factor RNase III.” Deltcheva E., Chylinski K., Sharma C. M., Gonzales K., Chao Y., Pirzada Z. A., Eckert M. R., Vogel J., Charpentier E., Nature 471:602-607(2011); and “A programmable dual-RNA-guided DNA endonuclease in adaptive bacterial immunity.” Jinek M., Chylinski K., Fonfara I., Hauer M., Doudna J. A., Charpentier E. Science 337:816-821(2012), the entire contents of each of which are incorporated herein by reference). Cas9 orthologs have been described in various species, including, but not limited to, S. pyogenes and S. thermophilus. Additional suitable Cas9 nucleases and sequences will be apparent to those of skill in the art based on this disclosure, and such Cas9 nucleases and sequences include Cas9 sequences from the organisms and loci disclosed in Chylinski, Rhun, and Charpentier, “The tracrRNA and Cas9 families of type II CRISPR-Cas immunity systems” (2013) RNA Biology 10:5, 726-737; the entire contents of which are incorporated herein by reference.

[0172] In some aspects, a nucleic acid programmable DNA binding protein (napDNAbp) is a Cas9 domain. Non-limiting, exemplary Cas9 domains are provided herein. The Cas9 domain may be a nuclease active Cas9 domain, a nuclease inactive Cas9 domain, or a Cas9 nickase. In some embodiments, the Cas9 domain is a nuclease active domain. For example, the Cas9 domain may be a Cas9 domain that cuts both strands of a duplexed nucleic acid (e.g., both strands of a duplexed DNA molecule). In some embodiments, the Cas9 domain comprises any one of the amino acid sequences as set forth herein. In some embodiments the Cas9 domain comprises an amino acid sequence that is at least 60%, at least 65%, at least 70%, at least 75%, at least 80%, at least 85%, at least 90%, at least 95%, at least 96%, at least 97%, at least 98%, at least 99%, or at least 99.5% identical to any one of the amino acid sequences set forth herein. In some embodiments, the Cas9 domain comprises an amino acid sequence that has 1, 2, 3, 4, 5, 6, 7, 8, 9, 10, 11, 12, 13, 14, 15, 16, 17, 18, 19, 20, 21, 22, 21, 24, 25, 26, 27, 28, 29, 30, 31, 32, 33, 34, 35, 36, 37, 38, 39, 40, 41, 42, 43, 44, 45, 46, 47, 48, 49, 50 or more mutations compared to any one of the amino acid sequences set forth herein. In some embodiments, the Cas9 domain comprises an amino acid sequence that has at least 10, at least 15, at least 20, at least 30, at least 40, at least 50, at least 60, at least 70, at least 80, at least 90, at least 100, at least 150, at least 200, at least 250, at least 300, at least 350, at least 400, at least 500, at least 600, at least 700, at least 800, at least 900, at least 1000, at least 1100, or at least 1200 identical contiguous amino acid residues as compared to any one of the amino acid sequences set forth herein.

[0173] In some embodiments, proteins comprising fragments of Cas9 are provided. For example, in some embodiments, a protein comprises one of two Cas9 domains: (1) the gRNA binding domain of Cas9; or (2) the DNA cleavage domain of Cas9. In some embodiments, proteins comprising Cas9 or fragments thereof are referred to as “Cas9 variants.” A Cas9 variant shares homology to Cas9, or a fragment thereof. For example, a Cas9 variant is at least about 70% identical, at least about 80% identical, at least about 90% identical, at least about 95% identical, at least about 96% identical, at least about 97% identical, at least about 98% identical, at least about 99% identical, at least about 99.5% identical, or at least about 99.9% identical to wild type Cas9. In some embodiments, the Cas9 variant may have 1, 2, 3, 4, 5, 6, 7, 8, 9, 10, 11, 12, 13, 14, 15, 16, 17, 18, 19, 20, 21, 22, 21, 24, 25, 26, 27, 28, 29, 30, 31, 32, 33, 34, 35, 36, 37, 38, 39, 40, 41, 42, 43, 44, 45, 46, 47, 48, 49, 50 or more amino acid changes compared to wild type Cas9. In some embodiments, the Cas9 variant comprises a fragment of Cas9 (e.g., a gRNA binding domain or a DNA-cleavage domain), such that the fragment is at least about 70% identical, at least about 80% identical, at least about 90% identical, at least about 95% identical, at least about 96% identical, at least about 97% identical, at least about 98% identical, at least about 99% identical, at least about 99.5% identical, or at least about 99.9% identical to the corresponding fragment of wild type Cas9. In some embodiments, the fragment is at least 30%, at least 35%, at least 40%, at least 45%, at least 50%, at least 55%, at least 60%, at least 65%, at least 70%, at least 75%, at least 80%, at least 85%, at least 90%, at least 95% identical, at least 96%, at least 97%, at least 98%, at least 99%, or at least 99.5% of the amino acid length of a corresponding wild type Cas9. In some embodiments, the fragment is at least 100 amino acids in length. In some embodiments, the fragment is at least 100, 150, 200, 250, 300, 350, 400, 450, 500, 550, 600, 650, 700, 750, 800, 850, 900, 950, 1000, 1050, 1100, 1150, 1200, 1250, or at least 1300 amino acids in length.

[0174] In some embodiments, Cas9 fusion proteins as provided herein comprise the full-length amino acid sequence of a Cas9 protein, e.g., one of the Cas9 sequences provided herein. In other embodiments, however, fusion proteins as provided herein do not comprise a full-length Cas9 sequence, but only one or more fragments thereof. Exemplary amino acid sequences of suitable Cas9 domains and Cas9 fragments are provided herein, and additional suitable sequences of Cas9 domains and fragments will be apparent to those of skill in the art.

[0175] A Cas9 protein can associate with a guide RNA that guides the Cas9 protein to a specific DNA sequence that has complementary to the guide RNA. In some embodiments, the polynucleotide programmable nucleotide binding domain is a Cas9 domain, for example a nuclease active Cas9, a Cas9 nickase (nCas9), or a nuclease inactive Cas9 (dCas9). Examples of nucleic acid programmable DNA binding proteins include, without limitation, Cas9 (e.g., dCas9 and nCas9), CasX, CasY, Cpf1, Cas12b/C2C1, and Cas12c/C2C3.

[0176] In some embodiments, wild type Cas9 corresponds to Cas9 from Streptococcus pyogenes (NCBI Reference Sequence: NC_017053.1, nucleotide and amino acid sequences as follows).

(SEQ ID NO: 51)
ATGGATAAGAAATACTCAATAGGCTTAGATATCGGCACAAATAGCGTCGGATGGGC
GGTGATCACTGATGATTATAAGGTTCCGTCTAAAAAGTTCAAGGTTCTGGGAAATA
CAGACCGCCACAGTATCAAAAAAAATCTTATAGGGGCTCTTTTATTTGGCAGTGGA
GAGACAGCGGAAGCGACTCGTCTCAAACGGACAGCTCGTAGAAGGTATACACGTCG
GAAGAATCGTATTTGTTATCTACAGGAGATTTTTTCAAATGAGATGGCGAAAGTAG
ATGATAGTTTCTTTCATCGACTTGAAGAGTCTTTTTTGGTGGAAGAAGACAAGAAGC
ATGAACGTCATCCTATTTTTGGAAATATAGTAGATGAAGTTGCTTATCATGAGAAAT
ATCCAACTATCTATCATCTGCGAAAAAAATTGGCAGATTCTACTGATAAAGCGGATT
TGCGCTTAATCTATTTGGCCTTAGCGCATATGATTAAGTTTCGTGGTCATTTTTTGAT
TGAGGGAGATTTAAATCCTGATAATAGTGATGTGGACAAACTATTTATCCAGTTGGT
ACAAATCTACAATCAATTATTTGAAGAAAACCCTATTAACGCAAGTAGAGTAGATG
CTAAAGCGATTCTTTCTGCACGATTGAGTAAATCAAGACGATTAGAAAATCTCATTG
CTCAGCTCCCCGGTGAGAAGAGAAATGGCTTGTTTGGGAATCTCATTGCTTTGTCAT
TGGGATTGACCCCTAATTTTAAATCAAATTTTGATTTGGCAGAAGATGCTAAATTAC
AGCTTTCAAAAGATACTTACGATGATGATTTAGATAATTTATTGGCGCAAATTGGAG
ATCAATATGCTGATTTGTTTTTGGCAGCTAAGAATTTATCAGATGCTATTTTACTTTC
AGATATCCTAAGAGTAAATAGTGAAATAACTAAGGCTCCCCTATCAGCTTCAATGA
TTAAGCGCTACGATGAACATCATCAAGACTTGACTCTTTTAAAAGCTTTAGTTCGAC
AACAACTTCCAGAAAAGTATAAAGAAATCTTTTTTGATCAATCAAAAAACGGATAT
GCAGGTTATATTGATGGGGGAGCTAGCCAAGAAGAATTTTATAAATTTATCAAACC
AATTTTAGAAAAAATGGATGGTACTGAGGAATTATTGGTGAAACTAAATCGTGAAG
ATTTGCTGCGCAAGCAACGGACCTTTGACAACGGCTCTATTCCCCATCAAATTCACT
TGGGTGAGCTGCATGCTATTTTGAGAAGACAAGAAGACTTTTATCCATTTTTAAAAG
ACAATCGTGAGAAGATTGAAAAAATCTTGACTTTTCGAATTCCTTATTATGTTGGTC
CATTGGCGCGTGGCAATAGTCGTTTTGCATGGATGACTCGGAAGTCTGAAGAAACA
ATTACCCCATGGAATTTTGAAGAAGTTGTCGATAAAGGTGCTTCAGCTCAATCATTT
ATTGAACGCATGACAAACTTTGATAAAAATCTTCCAAATGAAAAAGTACTACCAAA
ACATAGTTTGCTTTATGAGTATTTTACGGTTTATAACGAATTGACAAAGGTCAAATA
TGTTACTGAGGGAATGCGAAAACCAGCATTTCTTTCAGGTGAACAGAAGAAAGCCA
TTGTTGATTTACTCTTCAAAACAAATCGAAAAGTAACCGTTAAGCAATTAAAAGAA
GATTATTTCAAAAAAATAGAATGTTTTGATAGTGTTGAAATTTCAGGAGTTGAAGAT
AGATTTAATGCTTCATTAGGCGCCTACCATGATTTGCTAAAAATTATTAAAGATAAA
GATTTTTTGGATAATGAAGAAAATGAAGATATCTTAGAGGATATTGTTTTAACATTG
ACCTTATTTGAAGATAGGGGGATGATTGAGGAAAGACTTAAAACATATGCTCACCT
CTTTGATGATAAGGTGATGAAACAGCTTAAACGTCGCCGTTATACTGGTTGGGGAC
GTTTGTCTCGAAAATTGATTAATGGTATTAGGGATAAGCAATCTGGCAAAACAATA
TTAGATTTTTTGAAATCAGATGGTTTTGCCAATCGCAATTTTATGCAGCTGATCCAT
GATGATAGTTTGACATTTAAAGAAGATATTCAAAAAGCACAGGTGTCTGGACAAGG
CCATAGTTTACATGAACAGATTGCTAACTTAGCTGGCAGTCCTGCTATTAAAAAAGG
TATTTTACAGACTGTAAAAATTGTTGATGAACTGGTCAAAGTAATGGGGCATAAGC
CAGAAAATATCGTTATTGAAATGGCACGTGAAAATCAGACAACTCAAAAGGGCCAG
AAAAATTCGCGAGAGCGTATGAAACGAATCGAAGAAGGTATCAAAGAATTAGGAA
GTCAGATTCTTAAAGAGCATCCTGTTGAAAATACTCAATTGCAAAATGAAAAGCTC
TATCTCTATTATCTACAAAATGGAAGAGACATGTATGTGGACCAAGAATTAGATATT
AATCGTTTAAGTGATTATGATGTCGATCACATTGTTCCACAAAGTTTCATTAAAGAC
GATTCAATAGACAATAAGGTACTAACGCGTTCTGATAAAAATCGTGGTAAATCGGA
TAACGTTCCAAGTGAAGAAGTAGTCAAAAAGATGAAAAACTATTGGAGACAACTTC
TAAACGCCAAGTTAATCACTCAACGTAAGTTTGATAATTTAACGAAAGCTGAACGT
GGAGGTTTGAGTGAACTTGATAAAGCTGGTTTTATCAAACGCCAATTGGTTGAAACT
CGCCAAATCACTAAGCATGTGGCACAAATTTTGGATAGTCGCATGAATACTAAATA
CGATGAAAATGATAAACTTATTCGAGAGGTTAAAGTGATTACCTTAAAATCTAAAT
TAGTTTCTGACTTCCGAAAAGATTTCCAATTCTATAAAGTACGTGAGATTAACAATT
ACCATCATGCCCATGATGCGTATCTAAATGCCGTCGTTGGAACTGCTTTGATTAAGA
AATATCCAAAACTTGAATCGGAGTTTGTCTATGGTGATTATAAAGTTTATGATGTTC
GTAAAATGATTGCTAAGTCTGAGCAAGAAATAGGCAAAGCAACCGCAAAATATTTC
TTTTACTCTAATATCATGAACTTCTTCAAAACAGAAATTACACTTGCAAATGGAGAG
ATTCGCAAACGCCCTCTAATCGAAACTAATGGGGAAACTGGAGAAATTGTCTGGGA
TAAAGGGCGAGATTTTGCCACAGTGCGCAAAGTATTGTCCATGCCCCAAGTCAATA
TTGTCAAGAAAACAGAAGTACAGACAGGCGGATTCTCCAAGGAGTCAATTTTACCA
AAAAGAAATTCGGACAAGCTTATTGCTCGTAAAAAAGACTGGGATCCAAAAAAATA
TGGTGGTTTTGATAGTCCAACGGTAGCTTATTCAGTCCTAGTGGTTGCTAAGGTGGA
AAAAGGGAAATCGAAGAAGTTAAAATCCGTTAAAGAGTTACTAGGGATCACAATTA
TGGAAAGAAGTTCCTTTGAAAAAAATCCGATTGACTTTTTAGAAGCTAAAGGATAT
AAGGAAGTTAAAAAAGACTTAATCATTAAACTACCTAAATATAGTCTTTTTGAGTTA
GAAAACGGTCGTAAACGGATGCTGGCTAGTGCCGGAGAATTACAAAAAGGAAATG
AGCTGGCTCTGCCAAGCAAATATGTGAATTTTTTATATTTAGCTAGTCATTATGAAA
AGTTGAAGGGTAGTCCAGAAGATAACGAACAAAAACAATTGTTTGTGGAGCAGCAT
AAGCATTATTTAGATGAGATTATTGAGCAAATCAGTGAATTTTCTAAGCGTGTTATT
TTAGCAGATGCCAATTTAGATAAAGTTCTTAGTGCATATAACAAACATAGAGACAA
ACCAATACGTGAACAAGCAGAAAATATTATTCATTTATTTACGTTGACGAATCTTGG
AGCTCCCGCTGCTTTTAAATATTTTGATACAACAATTGATCGTAAACGATATACGTC
TACAAAAGAAGTTTTAGATGCCACTCTTATCCATCAATCCATCACTGGTCTTTATGA
AACACGCATTGATTTGAGTCAGCTAGGAGGTGACTGA
(SEQ ID NO: 52)
MDKKYSIGLDIGTNSVGWAVITDDYKVPSKKFKVLGNTDRHSIKKNLIGALLFGSGETA
EATRLKRTARRRYTRRKNRICYLQEIFSNEMAKVDDSFFHRLEESFLVEEDKKHERHPIF
GNIVDEVAYHEKYPTIYHLRKKLADSTDKADLRLIYLALAHMIKFRGHFLIEGDLNPDN
SDVDKLFIQLVQIYNQLFEENPINASRVDAKAILSARLSKSRRLENLIAQLPGEKRNGLFG
NLIALSLGLTPNFKSNFDLAEDAKLQLSKDTYDDDLDNLLAQIGDQYADLFLAAKNLSD
AILLSDILRVNSEITKAPLSASMIKRYDEHHQDLTLLKALVRQQLPEKYKEIFFDQSKNG
YAGYIDGGASQEEFYKFIKPILEKMDGTEELLVKLNREDLLRKQRTFDNGSIPHQIHLGE
LHAILRRQEDFYPFLKDNREKIEKILTFRIPYYVGPLARGNSRFAWMTRKSEETITPWNF
EEVVDKGASAQSFIERMTNFDKNLPNEKVLPKHSLLYEYFTVYNELTKVKYVTEGMRK
PAFLSGEQKKAIVDLLFKTNRKVTVKQLKEDYFKKIECFDSVEISGVEDRFNASLGAYH
DLLKIIKDKDFLDNEENEDILEDIVLTLTLFEDRGMIEERLKTYAHLFDDKVMKQLKRRR
YTGWGRLSRKLINGIRDKQSGKTILDFLKSDGFANRNFMQLIHDDSLTFKEDIQKAQVS
GQGHSLHEQIANLAGSPAIKKGILQTVKIVDELVKVMGHKPENIVIEMARENQTTQKGQ
KNSRERMKRIEEGIKELGSQILKEHPVENTQLQNEKLYLYYLQNGRDMYVDQELDINRL
SDYDVDHIVPOSFIKDDSIDNKVLTRSDKNRGKSDNVPSEEVVKKMKNYWRQLLNAKL
ITQRKFDNLTKAERGGLSELDKAGFIKRQLVETRQITKHVAQILDSRMNTKYDENDKLI
REVKVITLKSKLVSDFRKDFQFYKVREINNYHHAHDAYLNAVVGTAEIKKYPKLESEFV
YGDYKVYDVRKMIAKSEQEIGKATAKYFFYSNIMNFFKTEITLANGEIRKRPLIETNGET
GEIVWDKGRDFATVRKVLSMPQVNIVKKTEVQTGGFSKESILPKRNSDKLIARKKDWD
PKKYGGFDSPTVAYSVLVVAKVEKGKSKKLKSVKELLGITIMERSSFEKNPIDFLEAKG
YKEVKKDLIIKLPKYSLFELENGRKRMLASAGELQKGNELALPSKYVNFLYLASHYEKL
KGSPEDNEQKQLFVEQHKHYLDEIIEQISEFSKRVILADANLDKVLSAYNKHRDKPIREQ
AENIIHLFTLTNLGAPAAFKYFDTTIDRKRYTSTKEVLDATLIHQSITGLYETRIDLSQLG
GD
(single underline: HNH domain; double underline: RuvC domain)

[0177] In some embodiments, wild type Cas9 corresponds to, or comprises the following nucleotide and/or amino acid sequences:

(SEQ ID NO: 53)
ATGGATAAAAAGTATTCTATTGGTTTAGACATCGGCACTAATTCCGTTGGATGGGCT
GTCATAACCGATGAATACAAAGTACCTTCAAAGAAATTTAAGGTGTTGGGGAACAC
AGACCGTCATTCGATTAAAAAGAATCTTATCGGTGCCCTCCTATTCGATAGTGGCGA
AACGGCAGAGGCGACTCGCCTGAAACGAACCGCTCGGAGAAGGTATACACGTCGC
AAGAACCGAATATGTTACTTACAAGAAATTTTTAGCAATGAGATGGCCAAAGTTGA
CGATTCTTTCTTTCACCGTTTGGAAGAGTCCTTCCTTGTCGAAGAGGACAAGAAACA
TGAACGGCACCCCATCTTTGGAAACATAGTAGATGAGGTGGCATATCATGAAAAGT
ACCCAACGATTTATCACCTCAGAAAAAAGCTAGTTGACTCAACTGATAAAGCGGAC
CTGAGGTTAATCTACTTGGCTCTTGCCCATATGATAAAGTTCCGTGGGCACTTTCTC
ATTGAGGGTGATCTAAATCCGGACAACTCGGATGTCGACAAACTGTTCATCCAGTT
AGTACAAACCTATAATCAGTTGTTTGAAGAGAACCCTATAAATGCAAGTGGCGTGG
ATGCGAAGGCTATTCTTAGCGCCCGCCTCTCTAAATCCCGACGGCTAGAAAACCTG
ATCGCACAATTACCCGGAGAGAAGAAAAATGGGTTGTTCGGTAACCTTATAGCGCT
CTCACTAGGCCTGACACCAAATTTTAAGTCGAACTTCGACTTAGCTGAAGATGCCAA
ATTGCAGCTTAGTAAGGACACGTACGATGACGATCTCGACAATCTACTGGCACAAA
TTGGAGATCAGTATGCGGACTTATTTTTGGCTGCCAAAAACCTTAGCGATGCAATCC
TCCTATCTGACATACTGAGAGTTAATACTGAGATTACCAAGGCGCCGTTATCCGCTT
CAATGATCAAAAGGTACGATGAACATCACCAAGACTTGACACTTCTCAAGGCCCTA
GTCCGTCAGCAACTGCCTGAGAAATATAAGGAAATATTCTTTGATCAGTCGAAAAA
CGGGTACGCAGGTTATATTGACGGCGGAGCGAGTCAAGAGGAATTCTACAAGTTTA
TCAAACCCATATTAGAGAAGATGGATGGGACGGAAGAGTTGCTTGTAAAACTCAAT
CGCGAAGATCTACTGCGAAAGCAGCGGACTTTCGACAACGGTAGCATTCCACATCA
AATCCACTTAGGCGAATTGCATGCTATACTTAGAAGGCAGGAGGATTTTTATCCGTT
CCTCAAAGACAATCGTGAAAAGATTGAGAAAATCCTAACCTTTCGCATACCTTACT
ATGTGGGACCCCTGGCCCGAGGGAACTCTCGGTTCGCATGGATGACAAGAAAGTCC
GAAGAAACGATTACTCCATGGAATTTTGAGGAAGTTGTCGATAAAGGTGCGTCAGC
TCAATCGTTCATCGAGAGGATGACCAACTTTGACAAGAATTTACCGAACGAAAAAG
TATTGCCTAAGCACAGTTTACTTTACGAGTATTTCACAGTGTACAATGAACTCACGA
AAGTTAAGTATGTCACTGAGGGCATGCGTAAACCCGCCTTTCTAAGCGGAGAACAG
AAGAAAGCAATAGTAGATCTGTTATTCAAGACCAACCGCAAAGTGACAGTTAAGCA
ATTGAAAGAGGACTACTTTAAGAAAATTGAATGCTTCGATTCTGTCGAGATCTCCGG
GGTAGAAGATCGATTTAATGCGTCACTTGGTACGTATCATGACCTCCTAAAGATAAT
TAAAGATAAGGACTTCCTGGATAACGAAGAGAATGAAGATATCTTAGAAGATATAG
TGTTGACTCTTACCCTCTTTGAAGATCGGGAAATGATTGAGGAAAGACTAAAAACA
TACGCTCACCTGTTCGACGATAAGGTTATGAAACAGTTAAAGAGGCGTCGCTATAC
GGGCTGGGGACGATTGTCGCGGAAACTTATCAACGGGATAAGAGACAAGCAAAGT
GGTAAAACTATTCTCGATTTTCTAAAGAGCGACGGCTTCGCCAATAGGAACTTTATG
CAGCTGATCCATGATGACTCTTTAACCTTCAAAGAGGATATACAAAAGGCACAGGT
TTCCGGACAAGGGGACTCATTGCACGAACATATTGCGAATCTTGCTGGTTCGCCAGC
CATCAAAAAGGGCATACTCCAGACAGTCAAAGTAGTGGATGAGCTAGTTAAGGTCA
TGGGACGTCACAAACCGGAAAACATTGTAATCGAGATGGCACGCGAAAATCAAAC
GACTCAGAAGGGGCAAAAAAACAGTCGAGAGCGGATGAAGAGAATAGAAGAGGG
TATTAAAGAACTGGGCAGCCAGATCTTAAAGGAGCATCCTGTGGAAAATACCCAAT
TGCAGAACGAGAAACTTTACCTCTATTACCTACAAAATGGAAGGGACATGTATGTT
GATCAGGAACTGGACATAAACCGTTTATCTGATTACGACGTCGATCACATTGTACCC
CAATCCTTTTTGAAGGACGATTCAATCGACAATAAAGTGCTTACACGCTCGGATAA
GAACCGAGGGAAAAGTGACAATGTTCCAAGCGAGGAAGTCGTAAAGAAAATGAAG
AACTATTGGCGGCAGCTCCTAAATGCGAAACTGATAACGCAAAGAAAGTTCGATAA
CTTAACTAAAGCTGAGAGGGGTGGCTTGTCTGAACTTGACAAGGCCGGATTTATTA
AACGTCAGCTCGTGGAAACCCGCCAAATCACAAAGCATGTTGCACAGATACTAGAT
TCCCGAATGAATACGAAATACGACGAGAACGATAAGCTGATTCGGGAAGTCAAAGT
AATCACTTTAAAGTCAAAATTGGTGTCGGACTTCAGAAAGGATTTTCAATTCTATAA
AGTTAGGGAGATAAATAACTACCACCATGCGCACGACGCTTATCTTAATGCCGTCG
TAGGGACCGCACTCATTAAGAAATACCCGAAGCTAGAAAGTGAGTTTGTGTATGGT
GATTACAAAGTTTATGACGTCCGTAAGATGATCGCGAAAAGCGAACAGGAGATAGG
CAAGGCTACAGCCAAATACTTCTTTTATTCTAACATTATGAATTTCTTTAAGACGGA
AATCACTCTGGCAAACGGAGAGATACGCAAACGACCTTTAATTGAAACCAATGGGG
AGACAGGTGAAATCGTATGGGATAAGGGCCGGGACTTCGCGACGGTGAGAAAAGT
TTTGTCCATGCCCCAAGTCAACATAGTAAAGAAAACTGAGGTGCAGACCGGAGGGT
TTTCAAAGGAATCGATTCTTCCAAAAAGGAATAGTGATAAGCTCATCGCTCGTAAA
AAGGACTGGGACCCGAAAAAGTACGGTGGCTTCGATAGCCCTACAGTTGCCTATTC
TGTCCTAGTAGTGGCAAAAGTTGAGAAGGGAAAATCCAAGAAACTGAAGTCAGTCA
AAGAATTATTGGGGATAACGATTATGGAGCGCTCGTCTTTTGAAAAGAACCCCATC
GACTTCCTTGAGGCGAAAGGTTACAAGGAAGTAAAAAAGGATCTCATAATTAAACT
ACCAAAGTATAGTCTGTTTGAGTTAGAAAATGGCCGAAAACGGATGTTGGCTAGCG
CCGGAGAGCTTCAAAAGGGGAACGAACTCGCACTACCGTCTAAATACGTGAATTTC
CTGTATTTAGCGTCCCATTACGAGAAGTTGAAAGGTTCACCTGAAGATAACGAACA
GAAGCAACTTTTTGTTGAGCAGCACAAACATTATCTCGACGAAATCATAGAGCAAA
TTTCGGAATTCAGTAAGAGAGTCATCCTAGCTGATGCCAATCTGGACAAAGTATTA
AGCGCATACAACAAGCACAGGGATAAACCCATACGTGAGCAGGCGGAAAATATTA
TCCATTTGTTTACTCTTACCAACCTCGGCGCTCCAGCCGCATTCAAGTATTTTGACAC
AACGATAGATCGCAAACGATACACTTCTACCAAGGAGGTGCTAGACGCGACACTGA
TTCACCAATCCATCACGGGATTATATGAAACTCGGATAGATTTGTCACAGCTTGGGG
GTGACGGATCCCCCAAGAAGAAGAGGAAAGTCTCGAGCGACTACAAAGACCATGA
CGGTGATTATAAAGATCATGACATCGATTACAAGGATGACGATGACAAGGCTGCAG
GA
(SEQ ID NO: 54)
MDKKYSIGLAIGTNSVGWAVITDEYKVPSKKFKVLGNTDRHSIKKNLIGALLFDSGETA
EATRLKRTARRRYTRRKNRICYLQEIFSNEMAKVDDSFFHRLEESFLVEEDKKHERHPIF
GNIVDEVAYHEKYPTIYHLRKKLVDSTDKADLRLIYLALAHMIKFRGHFLIEGDLNPDN
SDVDKLFIQLVQTYNQLFEENPINASGVDAKAILSARLSKSRRLENLIAQLPGEKKNGLF
GNLIALSLGLTPNFKSNFDLAEDAKLQLSKDTYDDDLDNLLAQIGDQYADLFLAAKNLS
DAILLSDILRVNTEITKAPLSASMIKRYDEHHQDLTLLKALVRQQLPEKYKEIFFDQSKN
GYAGYIDGGASQEEFYKFIKPILEKMDGTEELLVKLNREDLLRKQRTFDNGSIPHQIHLG
ELHAILRRQEDFYPFLKDNREKIEKILTFRIPYYVGPLARGNSRFAWMTRKSEETITPWN
FEEVVDKGASAQSFIERMTNFDKNLPNEKVLPKHSLLYEYFTVYNELTKVKYVTEGMR
KPAFLSGEQKKAIVDLLFKTNRKVTVKQLKEDYFKKIECFDSVEISGVEDRFNASLGTY
HDLLKIIKDKDFLDNEENEDILEDIVLTLTLFEDREMIEERLKTYAHLFDDKVMKQLKRR
RYTGWGRLSRKLINGIRDKQSGKTILDFLKSDGFANRNFMQLIHDDSLTFKEDIQKAQV
SGQGDSLHEHIANLAGSPAIKKGILQTVKVVDELVKVMGRHKPENIVIEMARENQTTQK
GQKNSRERMKRIEEGIKELGSQILKEHPVENTQLQNEKLYLYYLQNGRDMYVDQELDI
NRLSDYDVDHIVPQSFLKDDSIDNKVLTRSDKNRGKSDNVPSEEVVKKMKNYWRQLL
NAKLITQRKFDNLTKAERGGLSELDKAGFIKRQLVETRQITKHVAQILDSRMNTKYDEN
DKTIREVKVITLKSKLVSDFRKDFQFYKVREINNYHHAHDAYLNAVVGTALIKKYPKLE
SEFVYGDYKVYDVRKMIAKSEQEIGKATAKYFFYSNIMNFFKTEITLANGEIRKRPLIET
NGETGEIVWDKGRDFATVRKVLSMPQVNIVKKTEVQTGGFSKESILPKRNSDKLIARKK
DWDPKKYGGFDSPTVAYSVLVVAKVEKGKSKKLKSVKELLGITIMERSSFEKNPIDFLE
AKGYKEVKKDLIIKLPKYSLFELENGRKRMLASAGELQKGNELALPSKYVNFLYLASH
YEKLKGSPEDNEQKQLFVEQHKHYLDEIIEQISEFSKRVILADANLDKVLSAYNKHRDK
PIREQAENIIHLFTLTNLGAPAAFKYFDTTIDRKRYTSTKEVLDATLIHQSITGLYETRIDL
SQLGGD
(single underline: HNH domain; double underline: RuvC domain).

[0178] In some embodiments, wild type Cas9 corresponds to Cas9 from Streptococcus pyogenes (NCBI Reference Sequence: NC_002737.2 (nucleotide sequence as follows); and Uniprot Reference Sequence: Q99ZW2 (amino acid sequence as follows):

(SEQ ID NO: 55)
ATGGATAAGAAATACTCAATAGGCTTAGATATCGGCACAAATAGCGTCGGATGGGC
GGTGATCACTGATGAATATAAGGTTCCGTCTAAAAAGTTCAAGGTTCTGGGAAATA
CAGACCGCCACAGTATCAAAAAAAATCTTATAGGGGCTCTTTTATTTGACAGTGGA
GAGACAGCGGAAGCGACTCGTCTCAAACGGACAGCTCGTAGAAGGTATACACGTCG
GAAGAATCGTATTTGTTATCTACAGGAGATTTTTTCAAATGAGATGGCGAAAGTAG
ATGATAGTTTCTTTCATCGACTTGAAGAGTCTTTTTTGGTGGAAGAAGACAAGAAGC
ATGAACGTCATCCTATTTTTGGAAATATAGTAGATGAAGTTGCTTATCATGAGAAAT
ATCCAACTATCTATCATCTGCGAAAAAAATTGGTAGATTCTACTGATAAAGCGGATT
TGCGCTTAATCTATTTGGCCTTAGCGCATATGATTAAGTTTCGTGGTCATTTTTTGAT
TGAGGGAGATTTAAATCCTGATAATAGTGATGTGGACAAACTATTTATCCAGTTGGT
ACAAACCTACAATCAATTATTTGAAGAAAACCCTATTAACGCAAGTGGAGTAGATG
CTAAAGCGATTCTTTCTGCACGATTGAGTAAATCAAGACGATTAGAAAATCTCATTG
CTCAGCTCCCCGGTGAGAAGAAAAATGGCTTATTTGGGAATCTCATTGCTTTGTCAT
TGGGTTTGACCCCTAATTTTAAATCAAATTTTGATTTGGCAGAAGATGCTAAATTAC
AGCTTTCAAAAGATACTTACGATGATGATTTAGATAATTTATTGGCGCAAATTGGAG
ATCAATATGCTGATTTGTTTTTGGCAGCTAAGAATTTATCAGATGCTATTTTACTTTC
AGATATCCTAAGAGTAAATACTGAAATAACTAAGGCTCCCCTATCAGCTTCAATGA
TTAAACGCTACGATGAACATCATCAAGACTTGACTCTTTTAAAAGCTTTAGTTCGAC
AACAACTTCCAGAAAAGTATAAAGAAATCTTTTTTGATCAATCAAAAAACGGATAT
GCAGGTTATATTGATGGGGGAGCTAGCCAAGAAGAATTTTATAAATTTATCAAACC
AATTTTAGAAAAAATGGATGGTACTGAGGAATTATTGGTGAAACTAAATCGTGAAG
ATTTGCTGCGCAAGCAACGGACCTTTGACAACGGCTCTATTCCCCATCAAATTCACT
TGGGTGAGCTGCATGCTATTTTGAGAAGACAAGAAGACTTTTATCCATTTTTAAAAG
ACAATCGTGAGAAGATTGAAAAAATCTTGACTTTTCGAATTCCTTATTATGTTGGTC
CATTGGCGCGTGGCAATAGTCGTTTTGCATGGATGACTCGGAAGTCTGAAGAAACA
ATTACCCCATGGAATTTTGAAGAAGTTGTCGATAAAGGTGCTTCAGCTCAATCATTT
ATTGAACGCATGACAAACTTTGATAAAAATCTTCCAAATGAAAAAGTACTACCAAA
ACATAGTTTGCTTTATGAGTATTTTACGGTTTATAACGAATTGACAAAGGTCAAATA
TGTTACTGAAGGAATGCGAAAACCAGCATTTCTTTCAGGTGAACAGAAGAAAGCCA
TTGTTGATTTACTCTTCAAAACAAATCGAAAAGTAACCGTTAAGCAATTAAAAGAA
GATTATTTCAAAAAAATAGAATGTTTTGATAGTGTTGAAATTTCAGGAGTTGAAGAT
AGATTTAATGCTTCATTAGGTACCTACCATGATTTGCTAAAAATTATTAAAGATAAA
GATTTTTTGGATAATGAAGAAAATGAAGATATCTTAGAGGATATTGTTTTAACATTG
ACCTTATTTGAAGATAGGGAGATGATTGAGGAAAGACTTAAAACATATGCTCACCT
CTTTGATGATAAGGTGATGAAACAGCTTAAACGTCGCCGTTATACTGGTTGGGGAC
GTTTGTCTCGAAAATTGATTAATGGTATTAGGGATAAGCAATCTGGCAAAACAATA
TTAGATTTTTTGAAATCAGATGGTTTTGCCAATCGCAATTTTATGCAGCTGATCCAT
GATGATAGTTTGACATTTAAAGAAGACATTCAAAAAGCACAAGTGTCTGGACAAGG
CGATAGTTTACATGAACATATTGCAAATTTAGCTGGTAGCCCTGCTATTAAAAAAGG
TATTTTACAGACTGTAAAAGTTGTTGATGAATTGGTCAAAGTAATGGGGCGGCATA
AGCCAGAAAATATCGTTATTGAAATGGCACGTGAAAATCAGACAACTCAAAAGGGC
CAGAAAAATTCGCGAGAGCGTATGAAACGAATCGAAGAAGGTATCAAAGAATTAG
GAAGTCAGATTCTTAAAGAGCATCCTGTTGAAAATACTCAATTGCAAAATGAAAAG
CTCTATCTCTATTATCTCCAAAATGGAAGAGACATGTATGTGGACCAAGAATTAGAT
ATTAATCGTTTAAGTGATTATGATGTCGATCACATTGTTCCACAAAGTTTCCTTAAA
GACGATTCAATAGACAATAAGGTCTTAACGCGTTCTGATAAAAATCGTGGTAAATC
GGATAACGTTCCAAGTGAAGAAGTAGTCAAAAAGATGAAAAACTATTGGAGACAA
CTTCTAAACGCCAAGTTAATCACTCAACGTAAGTTTGATAATTTAACGAAAGCTGAA
CGTGGAGGTTTGAGTGAACTTGATAAAGCTGGTTTTATCAAACGCCAATTGGTTGAA
ACTCGCCAAATCACTAAGCATGTGGCACAAATTTTGGATAGTCGCATGAATACTAA
ATACGATGAAAATGATAAACTTATTCGAGAGGTTAAAGTGATTACCTTAAAATCTA
AATTAGTTTCTGACTTCCGAAAAGATTTCCAATTCTATAAAGTACGTGAGATTAACA
ATTACCATCATGCCCATGATGCGTATCTAAATGCCGTCGTTGGAACTGCTTTGATTA
AGAAATATCCAAAACTTGAATCGGAGTTTGTCTATGGTGATTATAAAGTTTATGATG
TTCGTAAAATGATTGCTAAGTCTGAGCAAGAAATAGGCAAAGCAACCGCAAAATAT
TTCTTTTACTCTAATATCATGAACTTCTTCAAAACAGAAATTACACTTGCAAATGGA
GAGATTCGCAAACGCCCTCTAATCGAAACTAATGGGGAAACTGGAGAAATTGTCTG
GGATAAAGGGCGAGATTTTGCCACAGTGCGCAAAGTATTGTCCATGCCCCAAGTCA
ATATTGTCAAGAAAACAGAAGTACAGACAGGCGGATTCTCCAAGGAGTCAATTTTA
CCAAAAAGAAATTCGGACAAGCTTATTGCTCGTAAAAAAGACTGGGATCCAAAAAA
ATATGGTGGTTTTGATAGTCCAACGGTAGCTTATTCAGTCCTAGTGGTTGCTAAGGT
GGAAAAAGGGAAATCGAAGAAGTTAAAATCCGTTAAAGAGTTACTAGGGATCACA
ATTATGGAAAGAAGTTCCTTTGAAAAAAATCCGATTGACTTTTTAGAAGCTAAAGG
ATATAAGGAAGTTAAAAAAGACTTAATCATTAAACTACCTAAATATAGTCTTTTTGA
GTTAGAAAACGGTCGTAAACGGATGCTGGCTAGTGCCGGAGAATTACAAAAAGGA
AATGAGCTGGCTCTGCCAAGCAAATATGTGAATTTTTTATATTTAGCTAGTCATTAT
GAAAAGTTGAAGGGTAGTCCAGAAGATAACGAACAAAAACAATTGTTTGTGGAGC
AGCATAAGCATTATTTAGATGAGATTATTGAGCAAATCAGTGAATTTTCTAAGCGTG
TTATTTTAGCAGATGCCAATTTAGATAAAGTTCTTAGTGCATATAACAAACATAGAG
ACAAACCAATACGTGAACAAGCAGAAAATATTATTCATTTATTTACGTTGACGAAT
CTTGGAGCTCCCGCTGCTTTTAAATATTTTGATACAACAATTGATCGTAAACGATAT
ACGTCTACAAAAGAAGTTTTAGATGCCACTCTTATCCATCAATCCATCACTGGTCTT
TATGAAACACGCATTGATTTGAGTCAGCTAGGAGGTGACTGA
(SEQ ID NO: 56)
MDKKYSIGLDIGTNSVGWAVITDEYKVPSKKFKVLGNTDRHSIKKNLIGALLFDSGETA
EATRLKRTARRRYTRRKNRICYLQEIFSNEMAKVDDSFFHRLEESFLVEEDKKHERHPIF
GNIVDEVAYHEKYPTIYHLRKKLVDSTDKADLRLIYLALAHMIKFRGHFLIEGDLNPDN
SDVDKLFIQLVQTYNQLFEENPINASGVDAKAILSARLSKSRRLENLIAQLPGEKKNGLF
GNLIALSLGLTPNFKSNFDLAEDAKLQLSKDTYDDDLDNLLAQIGDQYADLFLAAKNLS
DAILLSDILRVNTEITKAPLSASMIKRYDEHHQDLTLLKALVRQQLPEKYKEIFFDQSKN
GYAGYIDGGASQEEFYKFIKPILEKMDGTEELLVKLNREDLLRKQRTFDNGSIPHQIHLG
ELHAILRRQEDFYPFLKDNREKIEKILTFRIPYYVGPLARGNSRFAWMTRKSEETITPWN
FEEVVDKGASAQSFIERMTNFDKNLPNEKVLPKHSLLYEYFTVYNELTKVKYVTEGMR
KPAFLSGEQKKAIVDLLFKTNRKVTVKQLKEDYFKKIECFDSVEISGVEDRFNASLGTY
HDLLKIIKDKDFLDNEENEDILEDIVLTLTLFEDREMIEERLKTYAHLFDDKVMKQLKRR
RYTGWGRLSRKLINGIRDKQSGKTILDFLKSDGFANRNFMQLIHDDSLTFKEDIQKAQV
SGQGDSLHEHIANLAGSPAIKKGILQTVKVVDELVKVMGRHKPENIVIEMARENQTTQK
GQKNSRERMKRIEEGIKELGSQILKEHPVENTQLQNEKLYLYYLQNGRDMYVDQELDI
NRLSDYDVDHIVPQSFLKDDSIDNKVLTRSDKNRGKSDNVPSEEVVKKMKNYWRQLL
NAKLITQRKFDNLTKAERGGLSELDKAGFIKRQLVETRQITKHVAQILDSRMNTKYDEN
DKLIREVKVITLKSKLVSDFRKDFQFYKVREINNYHHAHDAYLNAVVGTALIKKYPKLE
SEFVYGDYKVYDVRKMIAKSEQEIGKATAKYFFYSNIMNFFKTEITLANGEIRKRPLIET
NGETGEIVWDKGRDFATVRKVLSMPQVNIVKKTEVQTGGFSKESILPKRNSDKLIARKK
DWDPKKYGGFDSPTVAYSVLVVAKVEKGKSKKLKSVKELLGITIMERSSFEKNPIDFLE
AKGYKEVKKDLIIKLPKYSLFELENGRKRMLASAGELQKGNELALPSKYVNFLYLASH
YEKLKGSPEDNEQKQLFVEQHKHYLDEIIEQISEFSKRVILADANLDKVLSAYNKHRDK
PIREQAENIIHLFTLTNLGAPAAFKYFDTTIDRKRYTSTKEVLDATLIHQSITGLYETRIDL
SQLGGD
(single underline: HNH domain; double underline: RuvC domain)

[0179] In some embodiments, Cas9 refers to Cas9 from: Corynebacterium ulcerans (NCBI Refs: NC_015683.1, NC_017317.1); Corynebacterium diphtheria (NCBI Refs: NC_016782.1, NC_016786.1); Spiroplasma syrphidicola (NCBI Ref: NC_021284.1); Prevotella intermedia (NCBI Ref: NC_017861.1); Spiroplasma taiwanense (NCBI Ref: NC_021846.1); Streptococcus iniae (NCBI Ref: NC_021314.1); Belliella baltica (NCBI Ref: NC_018010.1); Psychroflexus torquisI (NCBI Ref: NC_018721.1); Streptococcus thermophilus (NCBI Ref: YP_820832.1), Listeria innocua (NCBI Ref: NP_472073.1), Campylobacter jejuni (NCBI Ref: YP_002344900.1) or Neisseria meningitidis (NCBI Ref: YP_002342100.1) or to a Cas9 from any other organism.

[0180] It should be appreciated that additional Cas9 proteins (e.g., a nuclease dead Cas9 (dCas9), a Cas9 nickase (nCas9), or a nuclease active Cas9), including variants and homologs thereof, are within the scope of this disclosure. Exemplary Cas9 proteins include, without limitation, those provided below. In some embodiments, the Cas9 protein is a nuclease dead Cas9 (dCas9). In some embodiments, the Cas9 protein is a Cas9 nickase (nCas9). In some embodiments, the Cas9 protein is a nuclease active Cas9.

[0181] In some embodiments, the Cas9 domain is a nuclease-inactive Cas9 domain (dCas9). For example, the dCas9 domain may bind to a duplexed nucleic acid molecule (e.g., via a gRNA molecule) without cleaving either strand of the duplexed nucleic acid molecule. In some embodiments, the nuclease-inactive dCas9 domain comprises a D10X mutation and a H840X mutation of the amino acid sequence set forth herein, or a corresponding mutation in any of the amino acid sequences provided herein, wherein X is any amino acid change. In some embodiments, the nuclease-inactive dCas9 domain comprises a D10A mutation and a H840A mutation of the amino acid sequence set forth herein, or a corresponding mutation in any of the amino acid sequences provided herein. As one example, a nuclease-inactive Cas9 domain comprises the amino acid sequence set forth in Cloning vector pPlatTET-gRNA2 (Accession No. BAV54124).

[0182] The amino acid sequence of an exemplary catalytically inactive Cas9 (dCas9) is as follows:

(SEQ ID NO: 57)
MDKKYSIGLAIGTNSVGWAVITDEYKVPSKKFKVLGNTDRHSIKKNLIGA
LLFDSGETAEATRLKRTARRRYTRRKNRICYLQEIFSNEMAKVDDSFFHR
LEESFLVEEDKKHERHPIFGNIVDEVAYHEKYPTIYHLRKKLVDSTDKAD
LRLIYLALAHMIKFRGHFLIEGDLNPDNSDVDKLFIQLVQTYNQLFEENP
INASGVDAKAILSARLSKSRRLENLIAQLPGEKKNGLFGNLIALSLGLTP
NFKSNFDLAEDAKLQLSKDTYDDDLDNLLAQIGDQYADLFLAAKNLSDAI
LLSDILRVNTEITKAPLSASMIKRYDEHHQDLTLLKALVRQQLPEKYKEI
FFDQSKNGYAGYIDGGASQEEFYKFIKPILEKMDGTEELLVKLNREDLLR
KQRTFDNGSIPHQIHLGELHAILRRQEDFYPFLKDNREKIEKILTFRIPY
YVGPLARGNSRFAWMTRKSEETITPWNFEEVVDKGASAQSFIERMTNFDK
NLPNEKVLPKHSLLYEYFTVYNELTKVKYVTEGMRKPAFLSGEQKKAIVD
LLFKTNRKVTVKQLKEDYFKKIECFDSVEISGVEDRFNASLGTYHDLLKI
IKDKDFLDNEENEDILEDIVLTLTLFEDREMIEERLKTYAHLFDDKVMKQ
LKRRRYTGWGRLSRKLINGIRDKQSGKTILDFLKSDGFANRNFMQLIHDD
SLTFKEDIQKAQVSGQGDSLHEHIANLAGSPAIKKGILQTVKVVDELVKV
MGRHKPENIVIEMARENQTTQKGQKNSRERMKRIEEGIKELGSQILKEHP
VENTQLQNEKLYLYYLQNGRDMYVDQELDINRLSDYDVDAIVPQSFLKDD
SIDNKVLTRSDKNRGKSDNVPSEEVVKKMKNYWRQLLNAKLITQRKFDNL
TKAERGGLSELDKAGFIKRQLVETRQITKHVAQILDSRMNTKYDENDKLI
REVKVITLKSKLVSDFRKDFQFYKVREINNYHHAHDAYLNAVVGTALIKK
YPKLESEFVYGDYKVYDVRKMIAKSEQEIGKATAKYFFYSNIMNFFKTEI
TLANGEIRKRPLIETNGETGEIVWDKGRDFATVRKVLSMPQVNIVKKTEV
QTGGFSKESILPKRNSDKLIARKKDWDPKKYGGFDSPTVAYSVLVVAKVE
KGKSKKLKSVKELLGITIMERSSFEKNPIDFLEAKGYKEVKKDLIIKLPK
YSLFELENGRKRMLASAGELQKGNELALPSKYVNFLYLASHYEKLKGSPE
DNEQKQLFVEQHKHYLDEIIEQISEFSKRVILADANLDKVLSAYNKHRDK
PIREQAENIIHLFTLTNLGAPAAFKYFDTTIDRKRYTSTKEVLDATLIHQ
SITGLYETRIDLSQLGGD

(see, e.g., Qi et al., “Repurposing CRISPR as an RNA-guided platform for sequence-specific control of gene expression.” Cell. 2013; 152(5):1173-83, the entire contents of which are incorporated herein by reference).

[0183] In some embodiments, a Cas9 nuclease has an inactive (e.g., an inactivated) DNA cleavage domain, that is, the Cas9 is a nickase, referred to as an “nCas9” protein (for “nickase” Cas9). A nuclease-inactivated Cas9 protein may interchangeably be referred to as a “dCas9” protein (for nuclease-“dead” Cas9) or catalytically inactive Cas9. Methods for generating a Cas9 protein (or a fragment thereof) having an inactive DNA cleavage domain are known (See, e.g., Jinek et al., Science. 337:816-821(2012); Qi et al., “Repurposing CRISPR as an RNA-Guided Platform for Sequence-Specific Control of Gene Expression” (2013) Cell. 28; 152(5):1173-83, the entire contents of each of which are incorporated herein by reference). For example, the DNA cleavage domain of Cas9 is known to include two subdomains, the HNH nuclease subdomain and the RuvC1 subdomain. The HNH subdomain cleaves the strand complementary to the gRNA, whereas the RuvC1 subdomain cleaves the non-complementary strand. Mutations within these subdomains can silence the nuclease activity of Cas9. For example, the mutations D10A and H840A completely inactivate the nuclease activity of S. pyogenes Cas9 (Jinek et al., Science. 337:816-821(2012); Qi et al., Cell. 28; 152(5):1173-83 (2013)).

[0184] In some embodiments, the dCas9 domain comprises an amino acid sequence that is at least 60%, at least 65%, at least 70%, at least 75%, at least 80%, at least 85%, at least 90%, at least 95%, at least 96%, at least 97%, at least 98%, at least 99%, or at least 99.5% identical to any one of the dCas9 domains provided herein. In some embodiments, the Cas9 domain comprises an amino acid sequences that has 1, 2, 3, 4, 5, 6, 7, 8, 9, 10, 11, 12, 13, 14, 15, 16, 17, 18, 19, 20, 21, 22, 21, 24, 25, 26, 27, 28, 29, 30, 31, 32, 33, 34, 35, 36, 37, 38, 39, 40, 41, 42, 43, 44, 45, 46, 47, 48, 49, 50 or more or more mutations compared to any one of the amino acid sequences set forth herein. In some embodiments, the Cas9 domain comprises an amino acid sequence that has at least 10, at least 15, at least 20, at least 30, at least 40, at least 50, at least 60, at least 70, at least 80, at least 90, at least 100, at least 150, at least 200, at least 250, at least 300, at least 350, at least 400, at least 500, at least 600, at least 700, at least 800, at least 900, at least 1000, at least 1100, or at least 1200 identical contiguous amino acid residues as compared to any one of the amino acid sequences set forth herein.

[0185] In some embodiments, dCas9 corresponds to, or comprises in part or in whole, a Cas9 amino acid sequence having one or more mutations that inactivate the Cas9 nuclease activity. For example, in some embodiments, a dCas9 domain comprises D10A and an H840A mutation or corresponding mutations in another Cas9.

[0186] In some embodiments, the dCas9 comprises the amino acid sequence of dCas9 (D10A and H840A):

(SEQ ID NO: 58)
MDKKYSIGLAIGTNSVGWAVITDEYKVPSKKFKVLGNTDRHSIKKNLIGA
LLFDSGETAEATRLKRTARRRYTRRKNRICYLQEIFSNEMAKVDDSFFHR
LEESFLVEEDKKHERHPIFGNIVDEVAYHEKYPTIYHLRKKLVDSTDKAD
LRLIYLALAHMIKFRGHFLIEGDLNPDNSDVDKLFIQLVQTYNQLFEENP
INASGVDAKAILSARLSKSRRLENLIAQLPGEKKNGLFGNLIALSLGLTP
NFKSNFDLAEDAKLQLSKDTYDDDLDNLLAQIGDQYADLFLAAKNLSDAI
LLSDILRVNTEITKAPLSASMIKRYDEHHQDLTLLKALVRQQLPEKYKEI
FFDQSKNGYAGYIDGGASQEEFYKFIKPILEKMDGTEELLVKLNREDLLR
KQRTFDNGSIPHQIHLGELHAILRRQEDFYPFLKDNREKIEKILTFRIPY
YVGPLARGNSRFAWMTRKSEETITPWNFEEVVDKGASAQSFIERMTNFDK
NLPNEKVLPKHSLLYEYFTVYNELTKVKYVTEGMRKPAFLSGEQKKAIVD
LLFKTNRKVTVKQLKEDYFKKIECFDSVEISGVEDRFNASLGTYHDLLKI
IKDKDFLDNEENEDILEDIVLTLTLFEDREMIEERLKTYAHLFDDKVMKQ
LKRRRYTGWGRLSRKLINGIRDKQSGKTILDFLKSDGFANRNFMQLIHDD
SLTFKEDIQKAQVSGQGDSLHEHIANLAGSPAIKKGILQTVKVVDELVKV
MGRHKPENIVIEMARENQTTQKGQKNSRERMKRIEEGIKELGSQILKEHP
VENTQLQNEKLYLYYLQNGRDMYVDQELDINRLSDYDVDAIVPQSFLKDD
SIDNKVLTRSDKNRGKSDNVPSEEVVKKMKNYWRQLLNAKLITQRKFDNL
TKAERGGLSELDKAGFIKRQLVETRQITKHVAQILDSRMNTKYDENDKLI
REVKVITLKSKLVSDFRKDFQFYKVREINNYHHAHDAYLNAVVGTALIKK
YPKLESEFVYGDYKVYDVRKMIAKSEQEIGKATAKYFFYSNIMNFFKTEI
TLANGEIRKRPLIETNGETGEIVWDKGRDFATVRKVLSMPQVNIVKKTEV
QTGGFSKESILPKRNSDKLIARKKDWDPKKYGGFDSPTVAYSVLVVAKVE
KGKSKKLKSVKELLGITIMERSSFEKNPIDFLEAKGYKEVKKDLIIKLPK
YSLFELENGRKRMLASAGELQKGNELALPSKYVNFLYLASHYEKLKGSPE
DNEQKQLFVEQHKHYLDEIIEQISEFSKRVILADANLDKVLSAYNKHRDK
PIREQAENIIHLFTLTNLGAPAAFKYFDTTIDRKRYTSTKEVLDATLIHQ
SITGLYETRIDLSQLGGD
(single underline: HNH domain; double underline:
RuvC domain).

[0187] In some embodiments, the Cas9 domain comprises a D10A mutation, while the residue at position 840 remains a histidine in the amino acid sequence provided above, or at corresponding positions in any of the amino acid sequences provided herein.

[0188] In other embodiments, dCas9 variants having mutations other than D10A and H840A are provided, which, e.g., result in nuclease inactivated Cas9 (dCas9). Such mutations, by way of example, include other amino acid substitutions at D10 and H840, or other substitutions within the nuclease domains of Cas9 (e.g., substitutions in the HNH nuclease subdomain and/or the RuvC1 subdomain). In some embodiments, variants or homologues of dCas9 are provided which are at least about 70% identical, at least about 80% identical, at least about 90% identical, at least about 95% identical, at least about 98% identical, at least about 99% identical, at least about 99.5% identical, or at least about 99.9% identical. In some embodiments, variants of dCas9 are provided having amino acid sequences which are shorter, or longer, by about 5 amino acids, by about 10 amino acids, by about 15 amino acids, by about 20 amino acids, by about 25 amino acids, by about 30 amino acids, by about 40 amino acids, by about 50 amino acids, by about 75 amino acids, by about 100 amino acids or more.

[0189] In some embodiments, the Cas9 domain is a Cas9 nickase. The Cas9 nickase may be a Cas9 protein that is capable of cleaving only one strand of a duplexed nucleic acid molecule (e.g., a duplexed DNA molecule). In some embodiments, the Cas9 nickase cleaves the target strand of a duplexed nucleic acid molecule, meaning that the Cas9 nickase cleaves the strand that is base paired to (complementary to) a gRNA (e.g., an sgRNA) that is bound to the Cas9. In some embodiments, a Cas9 nickase comprises a D10A mutation and has a histidine at position 840. In some embodiments, the Cas9 nickase cleaves the non-target, non-base-edited strand of a duplexed nucleic acid molecule, meaning that the Cas9 nickase cleaves the strand that is not base paired to a gRNA (e.g., an sgRNA) that is bound to the Cas9. In some embodiments, a Cas9 nickase comprises an H840A mutation and has an aspartic acid residue at position 10, or a corresponding mutation. In some embodiments, the Cas9 nickase comprises an amino acid sequence that is at least 60%, at least 65%, at least 70%, at least 75%, at least 80%, at least 85%, at least 90%, at least 95%, at least 96%, at least 97%, at least 98%, at least 99%, or at least 99.5% identical to any one of the Cas9 nickases provided herein. Additional suitable Cas9 nickases will be apparent to those of skill in the art based on this disclosure and knowledge in the field, and are within the scope of this disclosure.

[0190] The amino acid sequence of an exemplary catalytically Cas9 nickase (nCas9) is as follows:

(SEQ ID NO: 59)
MDKKYSIGLAIGTNSVGWAVITDEYKVPSKKFKVLGNTDRHSIKKNLIGA
LLFDSGETAEATRLKRTARRRYTRRKNRICYLQEIFSNEMAKVDDSFFHR
LEESFLVEEDKKHERHPIFGNIVDEVAYHEKYPTIYHLRKKLVDSTDKAD
LRLIYLALAHMIKFRGHFLIEGDLNPDNSDVDKLFIQLVQTYNQLFEENP
INASGVDAKAILSARLSKSRRLENLIAQLPGEKKNGLFGNLIALSLGLTP
NFKSNFDLAEDAKLQLSKDTYDDDLDNLLAQIGDQYADLFLAAKNLSDAI
LLSDILRVNTEITKAPLSASMIKRYDEHHQDLTLLKALVRQQLPEKYKEI
FFDQSKNGYAGYIDGGASQEEFYKFIKPILEKMDGTEELLVKLNREDLLR
KQRTFDNGSIPHQIHLGELHAILRRQEDFYPFLKDNREKIEKILTFRIPY
YVGPLARGNSRFAWMTRKSEETITPWNFEEVVDKGASAQSFIERMTNFDK
NLPNEKVLPKHSLLYEYFTVYNELTKVKYVTEGMRKPAFLSGEQKKAIVD
LLFKTNRKVTVKQLKEDYFKKIECFDSVEISGVEDRFNASLGTYHDLLKI
IKDKDFLDNEENEDILEDIVLTLTLFEDREMIEERLKTYAHLFDDKVMKQ
LKRRRYTGWGRLSRKLINGIRDKQSGKTILDFLKSDGFANRNFMQLIHDD
SLTFKEDIQKAQVSGQGDSLHEHIANLAGSPAIKKGILQTVKVVDELVKV
MGRHKPENIVIEMARENQTTQKGQKNSRERMKRIEEGIKELGSQILKEHP
VENTQLQNEKLYLYYLQNGRDMYVDQELDINRLSDYDVDHIVPQSFLKDD
SIDNKVLTRSDKNRGKSDNVPSEEVVKKMKNYWRQLLNAKLITQRKFDNL
TKAERGGLSELDKAGFIKRQLVETRQITKHVAQILDSRMNTKYDENDKLI
REVKVITLKSKLVSDFRKDFQFYKVREINNYHHAHDAYLNAVVGTALIKK
YPKLESEFVYGDYKVYDVRKMIAKSEQEIGKATAKYFFYSNIMNFFKTEI
TLANGEIRKRPLIETNGETGEIVWDKGRDFATVRKVLSMPQVNIVKKTEV
QTGGFSKESILPKRNSDKLIARKKDWDPKKYGGFDSPTVAYSVLVVAKVE
KGKSKKLKSVKELLGITIMERSSFEKNPIDFLEAKGYKEVKKDLIIKLPK
YSLFELENGRKRMLASAGELQKGNELALPSKYVNFLYLASHYEKLKGSPE
DNEQKQLFVEQHKHYLDEIIEQISEFSKRVILADANLDKVLSAYNKHRDK
PIREQAENIIHLFTLTNLGAPAAFKYFDTTIDRKRYTSTKEVLDATLIHQ
SITGLYETRIDLSQLGGD

[0191] In some embodiments, Cas9 refers to a Cas9 from archaea (e.g. nanoarchaea), which constitute a domain and kingdom of single-celled prokaryotic microbes. In some embodiments, the programmable nucleotide binding protein may be a CasX or CasY protein, which have been described in, for example, Burstein et al., “New CRISPR-Cas systems from uncultivated microbes.” Cell Res. 2017 Feb. 21. doi: 10.1038/cr.2017.21, the entire contents of which is hereby incorporated by reference. Using genome-resolved metagenomics, a number of CRISPR-Cas systems were identified, including the first reported Cas9 in the archaeal domain of life. This divergent Cas9 protein was found in little-studied nanoarchaea as part of an active CRISPR-Cas system. In bacteria, two previously unknown systems were discovered, CRISPR-CasX and CRISPR-CasY, which are among the most compact systems yet discovered. In some embodiments, in a base editor system described herein Cas9 is replaced by CasX, or a variant of CasX. In some embodiments, in a base editor system described herein Cas9 is replaced by CasY, or a variant of CasY. It should be appreciated that other RNA-guided DNA binding proteins may be used as a nucleic acid programmable DNA binding protein (napDNAbp), and are within the scope of this disclosure.

[0192] In some embodiments, the nucleic acid programmable DNA binding protein (napDNAbp) of any of the fusion proteins provided herein may be a CasX or CasY protein. In some embodiments, the napDNAbp is a CasX protein. In some embodiments, the napDNAbp is a CasY protein. In some embodiments, the napDNAbp comprises an amino acid sequence that is at least 85%, at least 90%, at least 91%, at least 92%, at least 93%, at least 94%, at least 95%, at least 96%, at least 97%, at least 98%, at least 99%, or at ease 99.5% identical to a naturally-occurring CasX or CasY protein. In some embodiments, the programmable nucleotide binding protein is a naturally-occurring CasX or CasY protein. In some embodiments, the programmable nucleotide binding protein comprises an amino acid sequence that is at least 85%, at least 90%, at least 91%, at least 92%, at least 93%, at least 94%, at least 95%, at least 96%, at least 97%, at least 98%, at least 99%, or at ease 99.5% identical to any CasX or CasY protein described herein. It should be appreciated that CasX and CasY from other bacterial species may also be used in accordance with the present disclosure.

[0193] An exemplary CasX ((uniprot.org/uniprot/FONN87; uniprot.org/uniprot/FONH53) tr|F0NN87|FONN87_SULIHCRISPR-associatedCasx protein OS=Sulfolobus islandicus (strain HVE10/4) GN=SiH_0402 PE=4 SV=1) amino acid sequence is as follows:

(SEQ ID NO: 60)
MEVPLYNIFGDNYIIQVATEAENSTIYNNKVEIDDEELRNVLNLAYKIAK
NNEDAAAERRGKAKKKKGEEGETTTSNIILPLSGNDKNPWTETLKCYNFP
TTVALSEVFKNFSQVKECEEVSAPSFVKPEFYEFGRSPGMVERTRRVKLE
VEPHYLIIAAAGWVLTRLGKAKVSEGDYVGVNVFTPTRGILYSLIQNVNG
IVPGIKPETAFGLWIARKVVSSVTNPNVSVVRIYTISDAVGQNPTTINGG
FSIDLTKLLEKRYLLSERLEAIARNALSISSNMRERYIVLANYIYEYLTG
SKRLEDLLYFANRDLIMNLNSDDGKVRDLKLISAYVNGELIRGEG.

[0194] An exemplary CasX (>tr|F0NH53|F0NH53_SULIR CRISPR associated protein, Casx OS=Sulfolobus islandicus (strain REY15A) GN=SiRe_0771 PE=4 SV=1) amino acid sequence is as follows:

(SEQ ID NO: 61)
MEVPLYNIFGDNYIIQVATEAENSTIYNNKVEIDDEELRNVLNLAYKIAK
NNEDAAAERRGKAKKKKGEEGETTTSNIILPLSGNDKNPWTETLKCYNFP
TTVALSEVFKNFSQVKECEEVSAPSFVKPEFYKFGRSPGMVERTRRVKLE
VEPHYLIMAAAGWVLTRLGKAKVSEGDYVGVNVFTPTRGILYSLIQNVNG
IVPGIKPETAFGLWIARKVVSSVTNPNVSVVSIYTISDAVGQNPTTINGG
FSIDLTKLLEKRDLLSERLEAIARNALSISSNMRERYIVLANYIYEYLTG
SKRLEDLLYFANRDLIMNLNSDDGKVRDLKLISAYVNGELIRGEG.
Deltaproteobacteria CasX
(SEQ ID NO: 62)
MEKRINKIRKKLSADNATKPVSRSGPMKTLLVRVMTDDLKKRLEKRRKKP
EVMPQVISNNAANNLRMLLDDYTKMKEAILQVYWQEFKDDHVGLMCKFAQ
PASKKIDQNKLKPEMDEKGNLTTAGFACSQCGQPLFVYKLEQVSEKGKAY
TNYFGRCNVAEHEKLILLAQLKPVKDSDEAVTYSLGKFGQRALDFYSIHV
TKESTHPVKPLAQIAGNRYASGPVGKALSDACMGTIASFLSKYQDIIIEH
QKVVKGNQKRLESLRELAGKENLEYPSVTLPPQPHTKEGVDfAYNEVIAR
VRMWVNLNLWQKLKLSRDDAKPLLRLKGFPSFPVVERRENEVDWWNTINE
VKKLIDAKRDMGRVFWSGVTAEKRNTILEGYNYLPNENDHKKREGSLENP
KKPAKRQFGDLLLYLEKKYAGDWGKVFDEAWERIDKKIAGLTSHIEREEA
RNAEDAQSKAVLTDWLRAKASFVLERLKEMDEKEFYACEIQLQKWYGDLR
GNPFAVEAENRVVDISGFSIGSDGHSIQYRNLLAWKYLENGKREFYLLMN
YGKKGRIRFTDGTDIKKSGKWQGLLYGGGKAKVIDLTFDPDDEQLIILPL
AFGTRQGREFIWNDLLSLETGLIKLANGRVIEKTIYNKKIGRDEPALFVA
LTFERREVVDPSNIKPVNLIGVARGENIPAVIALTDPEGCPLPEFKDSSG
GPTDILRIGEGYKEKQRAIQAAKEVEQRRAGGYSRKFASKSRNLADDMVR
NSARDLFYHAVTHDAVLVFANLSRGFGRQGKRTFMTERQYTKMEDWLTAK
LAYEGLTSKTYLSKTLAQYTSKTCSNCGFTITYADMDVMLVRLKKTSDGW
ATTLNNKELKAEYQITYYNRYKRQTVEKELSAELDRLSEESGNNDISKWT
KGRRDEALFLLKKRFSHRPVQEQFVCLDCGHEVHAAEQAALNIARSWLFL
NSNSTEFKSYKSGKQPFVGAWQAFYKRRLKEVWKPNA

[0195] An exemplary CasY ((ncbi.nlm.nih.gov/protein/APG80656.1)>APG80656.1 CRISPR-associated protein CasY [uncultured Parcubacteria group bacterium]) amino acid sequence is as follows:

(SEQ ID NO: 63)
MSKRHPRISGVKGYRLHAQRLEYTGKSGAMRTIKY
PLYSSPSGGRTVPREIVSAINDDYVGLYGLSNFDD
LYNAEKRNEEKVYSVLDFWYDCVQYGAVFSYTAPG
LLKNVAEVRGGSYELTKTLKGSHLYDELQIDKVIK
FLNKKEISRANGSLDKLKKDIIDCFKAEYRERHKD
QCNKLADDIKNAKKDAGASLGERQKKLFRDFFGIS
EQSENDKPSFTNPLNLTCCLLPFDTVNNNRNRGEV
LFNKLKEYAQKLDKNEGSLEMWEYIGIGNSGTAFS
NFLGEGFLGRLRENKITELKKAMMDITDAWRGQEQ
EEELEKRLRILAALTIKLREPKFDNHWGGYRSDIN
GKLSSWLQNYINQTVKIKEDLKGHKKDLKKAKEMI
NRFGESDTKEEAVVSSLLESIEKIVPDDSADDEKP
DIPAIAIYRRFLSDGRLTLNRFVQREDVQEALIKE
RLEAEKKKKPKKRKKKSDAEDEKETIDFKELFPHL
AKPLKLVPNFYGDSKRELYKKYKNAAIYTDALWKA
VEKIYKSAFSSSLKNSFFDTDFDKDFFIKRLQKIF
SVYRRFNTDKWKPIVKNSFAPYCDIVSLAENEVLY
KPKQSRSRKSAAIDKNRVRLPSTENIAKAGIALAR
ELSVAGFDWKDLLKKEEHEEYIDLIELHKTALALL
LAVTETQLDISALDFVENGTVKDFMKTRDGNLVLE
GRFLEMFSQSIVFSELRGLAGLMSRKEFITRSAIQ
TMNGKQAELLYIPHEFQSAKITTPKEMSRAFLDLA
PAEFATSLEPESLSEKSLLKLKQMRYYPHYFGYEL
TRTGQGIDGGVAENALRLEKSPVKKREIKCKQYKT
LGRGQNKIVLYVRSSYYQTQFLEWFLHRPKNVQTD
VAVSGSFLIDEKKVKTRWNYDALTVALEPVSGSER
VFVSQPFTIFPEKSAEEEGQRYLGIDIGEYGIAYT
ALEITGDSAKILDQNFISDPQLKTLREEVKGLKLD
QRRGTFAMPSTKIARIRESLVHSLRNRIHHLALKH
KAKIVYELEVSRFEEGKQKIKKVYATLKKADVYSE
IDADKNLQTTVWGKLAVASEISASYTSQFCGACKK
LWRAEMQVDETITTQELIGTVRVIKGGTLIDAIKD
FMRPPIFDENDTPFPKYRDFCDKHHISKKMRGNSC
LFICPFCRANADADIQASQTIALLRYVKEEKKVED
YFERFRKLKNIKVLGQMKKI.

[0196] In some embodiments, the nucleic acid programmable DNA binding protein (napDNAbp) is a single effector of a microbial CRISPR-Cas system. Single effectors of microbial CRISPR-Cas systems include, without limitation, Cas9, Cpf1, Cas12b/C2c1, and Cas12c/C2c3. Typically, microbial CRISPR-Cas systems are divided into Class 1 and Class 2 systems. Class 1 systems have multisubunit effector complexes, while Class 2 systems have a single protein effector. For example, Cas9 and Cpf1 are Class 2 effectors. In addition to Cas9 and Cpf1, three distinct Class 2 CRISPR-Cas systems (Cas12b/C2c1, and Cas12c/C2c3) have been described by Shmakov et al., “Discovery and Functional Characterization of Diverse Class 2 CRISPR Cas Systems”, Mol. Cell, 2015 Nov. 5; 60(3): 385-397, the entire contents of which is hereby incorporated by reference. Effectors of two of the systems, Cas12b/C2c1, and Cas12c/C2c3, contain RuvC-like endonuclease domains related to Cpf1. A third system, contains an effector with two predicated HEPN RNase domains. Production of mature CRISPR RNA is tracrRNA-independent, unlike production of CRISPR RNA by Cas12b/C2c1. Cas12b/C2c1 depends on both CRISPR RNA and tracrRNA for DNA cleavage.

[0197] The crystal structure of Alicyclobacillus acidoterrestris Cas12b/C2c1 (AacC2c1) has been reported in complex with a chimeric single-molecule guide RNA (sgRNA). See e.g., Liu et al., “C2c1-sgRNA Complex Structure Reveals RNA-Guided DNA Cleavage Mechanism”, Mol. Cell, 2017 Jan. 19; 65(2):310-322, the entire contents of which are hereby incorporated by reference. The crystal structure has also been reported in Alicyclobacillus acidoterrestris C2c1 bound to target DNAs as ternary complexes. See e.g., Yang et al., “PAM-dependent Target DNA Recognition and Cleavage by C2C1 CRISPR-Cas endonuclease”, Cell, 2016 Dec. 15; 167(7):1814-1828, the entire contents of which are hereby incorporated by reference. Catalytically competent conformations of AacC2c1, both with target and non-target DNA strands, have been captured independently positioned within a single RuvC catalytic pocket, with Cas12b/C2c1-mediated cleavage resulting in a staggered seven-nucleotide break of target DNA. Structural comparisons between Cas12b/C2c1 ternary complexes and previously identified Cas9 and Cpf1 counterparts demonstrate the diversity of mechanisms used by CRISPR-Cas9 systems.

[0198] In some embodiments, the nucleic acid programmable DNA binding protein (napDNAbp) of any of the fusion proteins provided herein may be a Cas12b/C2c1, or a Cas12c/C2c3 protein. In some embodiments, the napDNAbp is a Cas12b/C2c1 protein. In some embodiments, the napDNAbp is a Cas12c/C2c3 protein. In some embodiments, the napDNAbp comprises an amino acid sequence that is at least 85%, at least 90%, at least 91%, at least 92%, at least 93%, at least 94%, at least 95%, at least 96%, at least 97%, at least 98%, at least 99%, or at ease 99.5% identical to a naturally-occurring Cas12b/C2c1 or Cas12c/C2c3 protein. In some embodiments, the napDNAbp is a naturally-occurring Cas12b/C2c1 or Cas12c/C2c3 protein. In some embodiments, the napDNAbp comprises an amino acid sequence that is at least 85%, at least 90%, at least 91%, at least 92%, at least 93%, at least 94%, at least 95%, at least 96%, at least 97%, at least 98%, at least 99%, or at ease 99.5% identical to any one of the napDNAbp sequences provided herein. It should be appreciated that Cas12b/C2c1 or Cas12c/C2c3 from other bacterial species may also be used in accordance with the present disclosure.

[0199] A Cas12b/C2c1 ((uniprot.org/uniprot/TOD7A2 #2) sp|T0D7A2|C2C1_ALIAG CRISPR-associated endonuclease C2c1 OS=Alicyclobacillus acido-terrestris (strain ATCC 49025/DSM 3922/CIP 106132/NCIMB 13137/GD3B) GN=c2c1 PE=1 SV=1) amino acid sequence is as follows:

(SEQ ID NO: 64)
MAVKSIKVKLRLDDMPEIRAGLWKLHKEVNAGVRY
YTEWLSLLRQENLYRRSPNGDGEQECDKTAEECKA
ELLERLRARQVENGHRGPAGSDDELLQLARQLYEL
LVPQAIGAKGDAQQIARKFLSPLADKDAVGGLGIA
KAGNKPRWVRMREAGEPGWEEEKEKAETRKSADRT
ADVLRALADFGLKPLMRVYTDSEMSSVEWKPLRKG
QAVRTWDRDMFQQAIERMMSWESWNQRVGQEYAKL
VEQKNRFEQKNFVGQEHLVHLVNQLQQDMKEASPG
LESKEQTAHYVTGRALRGSDKVFEKWGKLAPDAPF
DLYDAEIKNVQRRNTRRFGSHDLFAKLAEPEYQAL
WREDASFLTRYAVYNSILRKLNHAKMFATFTLPDA
TAHPIWTRFDKLGGNLHQYTFLFNEFGERRHAIRF
HKLLKVENGVAREVDDVTVPISMSEQLDNLLPRDP
NEPIALYFRDYGAEQHFTGEFGGAKIQCRRDQLAH
MHRRRGARDVYLNVSVRVQSQSEARGERRPPYAAV
FRLVGDNHRAFVHFDKLSDYLAEHPDDGKLGSEGL
LSGLRVMSVDLGLRTSASISVFRVARKDELKPNSK
GRVPFFFPIKGNDNLVAVHERSQLLKLPGETESKD
LRAIREERQRTLRQLRTQLAYLRLLVRCGSEDVGR
RERSWAKLIEQPVDAANHMTPDWREAFENELQKLK
SLHGICSDKEWMDAVYESVRRVWRHMGKQVRDWRK
DVRSGERPKIRGYAKDVVGGNSIEQIEYLERQYKF
LKSWSFFGKVSGQVIRAEKGSRFAITLREHIDHAK
EDRLKKLADRIIMEALGYVYALDERGKGKWVAKYP
PCQLILLEELSEYQFNNDRPPSENNQLMQWSHRGV
FQELINQAQVHDLLVGTMYAAFSSRFDARTGAPGI
RCRRVPARCTQEHNPEPFPWWLNKFVVEHTLDACP
LRADDLIPTGEGEIFVSPFSAEEGDFHQIHADLNA
AQNLQQRLWSDFDISQIRLRCDWGEVDGELVLIPR
LTGKRTADSYSNKVFYTNTGVTYYERERGKKRRKV
FAQEKLSEEEAELLVEADEAREKSVVLMRDPSGII
NRGNWTRQKEFWSMVNQRIEGYLVKQIRSRVPLQD
SACENTGDI.
hCas12b (Bacillus hisashii) NCBI
Reference Sequence: WP_095142515
(SEQ ID NO: 65)
MAPKKKRKVGIHGVPAAATRSFILKIEPNEEVKKG
LWKTHEVLNHGIAYYMNILKLIRQEAIYEHHEQDP
KNPKKVSKAEIQAELWDFVLKMQKCNSFTHEVDKD
EVFNILRELYEELVPSSVEKKGEANQLSNKFLYPL
VDPNSQSGKGTASSGRKPRWYNLKIAGDPSWEEEK
KKWEEDKKKDPLAKILGKLAEYGLIPLFIPYTDSN
EPIVKEIKWMEKSRNQSVRRLDKDMFIQALERFLS
WESWNLKVKEEYEKVEKEYKTLEERIKEDIQALKA
LEQYEKERQEQLLRDTLNTNEYRLSKRGLRGWREI
IQKWLKMDENEPSEKYLEVFKDYQRKHPREAGDYS
VYEFLSKKENHFIWRNHPEYPYLYATFCEIDKKKK
DAKQQATFTLADPINHPLWVRFEERSGSNLNKYRI
LTEQLHTEKLKKKLTVQLDRLIYPTESGGWEEKGK
VDIVLLPSRQFYNQIFLDIEEKGKHAFTYKDESIK
FPLKGTLGGARVQFDRDHLRRYPHKVESGNVGRIY
FNMTVNIEPTESPVSKSLKIHRDDFPKVVNFKPKE
LTEWIKDSKGKKLKSGIESLEIGLRVMSIDLGQRQ
AAAASIFEVVDQKPDIEGKLFFPIKGTELYAVHRA
SFNIKLPGETLVKSREVLRKAREDNLKLMNQKLNF
LRNVLHFQQFEDITEREKRVTKWISRQENSDVPLV
YQDELIQIRELMYKPYKDWVAFLKQLHKRLEVEIG
KEVKHWRKSLSDGRKGLYGISLKNIDEIDRTRKFL
LRWSLRPTEPGEVRRLEPGQRFAIDQLNHLNALKE
DRLKKMANTIIMHALGYCYDVRKKKWQAKNPACQI
ILFEDLSNYNPYEERSRFENSKLMKWSRREIPRQV
ALQGEIYGLQVGEVGAQFSSRFHAKTGSPGIRCSV
VTKEKLQDNRFFKNLQREGRLTLDKIAVLKEGDLY
PDKGGEKFISLSKDRKCVTTHADINAAQNLQKRFW
TRTHGFYKVYCKAYQVDGQTVYIPESKDQKQKIIE
EFGEGYFILKDGVYEWVNAGKLKIKKGSSKQSSSE
LVDSDILKDSFDLASELKGEKLMLYRDPSGNVFPS
DKWMAAGVFFGKLERILISKLTNQYSISTIEDDSS
KQSMKRPAATKKAGQAKKKK

[0200] In some embodiments, the Cas12b is BvCas12B, which is a variant of BhCas12b and comprises the following changes relative to BhCas12B: S893R, K846R, and E837G. BvCas12b (Bacillus sp. V3-13) NCBI Reference Sequence: WP_101661451.1

(SEQ ID NO: 66)
MAIRSIKLKMKTNSGTDSIYLRKALWRTHQLINEG
IAYYMNLLTLYRQEAIGDKTKEAYQAELINIIRNQ
QRNNGSSEEHGSDQEILALLRQLYELIIPSSIGES
GDANQLGNKFLYPLVDPNSQSGKGTSNAGRKPRWK
RLKEEGNPDWELEKKKDEERKAKDPTVKIFDNLNK
YGLLPLFPLFTNIQKDIEWLPLGKRQSVRKWDKDM
FIQAIERLLSWESWNRRVADEYKQLKEKTESYYKE
HLTGGEEWIEKIRKFEKERNMELEKNAFAPNDGYF
ITSRQIRGWDRVYEKWSKLPESASPEELWKVVAEQ
QNKMSEGFGDPKVFSFLANRENRDIWRGHSERIYH
IAAYNGLQKKLSRTKEQATFTLPDAIEHPLWIRYE
SPGGTNLNLFKLEEKQKKNYYVTLSKIIWPSEEKW
IEKENIEIPLAPSIQFNRQIKLKQHVKGKQEISFS
DYSSRISLDGVLGGSRIQFNRKYIKNHKELLGEGD
IGPVFFNLVVDVAPLQETRNGRLQSPIGKALKVIS
SDFSKVIDYKPKELMDWMNTGSASNSFGVASLLEG
MRVMSIDMGQRTSASVSIFEVVKELPKDQEQKLFY
SINDTELFAIHKRSFLLNLPGEVVTKNNKQQRQER
RKKRQFVRSQIRMLANVLRLETKKTPDERKKAIHK
LMEIVQSYDSWTASQKEVWEKELNLLTNMAAFNDE
IWKESLVELHHRIEPYVGQIVSKWRKGLSEGRKNL
AGISMWNIDELEDTRRLLISWSKRSRTPGEANRIE
TDEPFGSSLLQHIQNVKDDRLKQMANLIIMTALGF
KYDKEEKDRYKRWKETYPACQIILFENLNRYLFNL
DRSRRENSRLMKWAHRSIPRTVSMQGEMFGLQVGD
VRSEYSSRFHAKTGAPGIRCHALTEEDLKAGSNTL
KRLIEDGFINESELAYLKKGDIIPSQGGELFVTLS
KRYKKDSDNNELTVIHADINAAQNLQKRFWQQNSE
VYRVPCQLARMGEDKLYIPKSQTETIKKYFGKGSF
VKNNTEQEVYKWEKSEKMKIKTDTTFDLQDLDGFE
DISKTIELAQEQQKKYLTMFRDPSGYFFNNETWRP
QKEYWSIVNNIIKSCLKKKILSNKVEL

[0201] The Cas9 nuclease has two functional endonuclease domains: RuvC and HNH. Cas9 undergoes a second conformational change upon target binding that positions the nuclease domains to cleave opposite strands of the target DNA. The end result of Cas9-mediated DNA cleavage is a double-strand break (DSB) within the target DNA (˜3-4 nucleotides upstream of the PAM sequence). The resulting DSB is then repaired by one of two general repair pathways: (1) the efficient but error-prone non-homologous end joining (NHEJ) pathway; or (2) the less efficient but high-fidelity homology directed repair (HDR) pathway.

[0202] The “efficiency” of non-homologous end joining (NHEJ) and/or homology directed repair (HDR) can be calculated by any convenient method. For example, in some cases, efficiency can be expressed in terms of percentage of successful HDR. For example, a surveyor nuclease assay can be used can be used to generate cleavage products and the ratio of products to substrate can be used to calculate the percentage. For example, a surveyor nuclease enzyme can be used that directly cleaves DNA containing a newly integrated restriction sequence as the result of successful HDR. More cleaved substrate indicates a greater percent HDR (a greater efficiency of HDR). As an illustrative example, a fraction (percentage) of HDR can be calculated using the following equation [(cleavage products)/(substrate plus cleavage products)] (e.g., (b+c)/(a+b+c), where “a” is the band intensity of DNA substrate and “b” and “c” are the cleavage products).

[0203] In some cases, efficiency can be expressed in terms of percentage of successful NHEJ. For example, a T7 endonuclease I assay can be used to generate cleavage products and the ratio of products to substrate can be used to calculate the percentage NHEJ. T7 endonuclease Icleaves mismatched heteroduplex DNA which arises from hybridization of wild-type and mutant DNA strands (NHEJ generates small random insertions or deletions (indels) at the site of the original break). More cleavage indicates a greater percent NHEJ (a greater efficiency of NHEJ). As an illustrative example, a fraction (percentage) of NHEJ can be calculated using the following equation: (1-(1-(b+c)/(a+b+c))^{1/2})×100, where “a” is the band intensity of DNA substrate and “b” and “c” are the cleavage products (Ran et. al., Cell. 2013 Sep. 12; 154(6):1380-9; and Ran et al., Nat Protoc. 2013 November; 8(11): 2281-2308).

[0204] The NHEJ repair pathway is the most active repair mechanism, and it frequently causes small nucleotide insertions or deletions (indels) at the DSB site. The randomness of NHEJ-mediated DSB repair has important practical implications, because a population of cells expressing Cas9 and a gRNA or a guide polynucleotide can result in a diverse array of mutations. In most cases, NHEJ gives rise to small indels in the target DNA that result in amino acid deletions, insertions, or frameshift mutations leading to premature stop codons within the open reading frame (ORF) of the targeted gene. The ideal end result is a loss-of-function mutation within the targeted gene.

[0205] While NHEJ-mediated DSB repair often disrupts the open reading frame of the gene, homology directed repair (HDR) can be used to generate specific nucleotide changes ranging from a single nucleotide change to large insertions like the addition of a fluorophore or tag.

[0206] In order to utilize HDR for gene editing, a DNA repair template containing the desired sequence can be delivered into the cell type of interest with the gRNA(s) and Cas9 or Cas9 nickase. The repair template can contain the desired edit as well as additional homologous sequence immediately upstream and downstream of the target (termed left & right homology arms). The length of each homology arm can be dependent on the size of the change being introduced, with larger insertions requiring longer homology arms. The repair template can be a single-stranded oligonucleotide, double-stranded oligonucleotide, or a double-stranded DNA plasmid. The efficiency of HDR is generally low (<10% of modified alleles) even in cells that express Cas9, gRNA and an exogenous repair template. The efficiency of HDR can be enhanced by synchronizing the cells, since HDR takes place during the S and G2 phases of the cell cycle. Chemically or genetically inhibiting genes involved in NHEJ can also increase HDR frequency.

[0207] In some embodiments, Cas9 is a modified Cas9. A given gRNA targeting sequence can have additional sites throughout the genome where partial homology exists. These sites are called off-targets and need to be considered when designing a gRNA. In addition to optimizing gRNA design, CRISPR specificity can also be increased through modifications to Cas9. Cas9 generates double-strand breaks (DSBs) through the combined activity of two nuclease domains, RuvC and HNH. Cas9 nickase, a D10A mutant of SpCas9, retains one nuclease domain and generates a DNA nick rather than a DSB. The nickase system can also be combined with HDR-mediated gene editing for specific gene edits.

[0208] In some cases, Cas9 is a variant Cas9 protein. A variant Cas9 polypeptide has an amino acid sequence that is different by one amino acid (e.g., has a deletion, insertion, substitution, fusion) when compared to the amino acid sequence of a wild type Cas9 protein. In some instances, the variant Cas9 polypeptide has an amino acid change (e.g., deletion, insertion, or substitution) that reduces the nuclease activity of the Cas9 polypeptide. For example, in some instances, the variant Cas9 polypeptide has less than 50%, less than 40%, less than 30%, less than 20%, less than 10%, less than 5%, or less than 1% of the nuclease activity of the corresponding wild-type Cas9 protein. In some cases, the variant Cas9 protein has no substantial nuclease activity. When a subject Cas9 protein is a variant Cas9 protein that has no substantial nuclease activity, it can be referred to as “dCas9.”

[0209] In some cases, a variant Cas9 protein has reduced nuclease activity. For example, a variant Cas9 protein exhibits less than about 20%, less than about 15%, less than about 10%, less than about 5%, less than about 1%, or less than about 0.1%, of the endonuclease activity of a wild-type Cas9 protein, e.g., a wild-type Cas9 protein.

[0210] In some cases, a variant Cas9 protein can cleave the complementary strand of a guide target sequence but has reduced ability to cleave the non-complementary strand of a double stranded guide target sequence. For example, the variant Cas9 protein can have a mutation (amino acid substitution) that reduces the function of the RuvC domain. As a non-limiting example, in some embodiments, a variant Cas9 protein has a D10A (aspartate to alanine at amino acid position 10) and can therefore cleave the complementary strand of a double stranded guide target sequence but has reduced ability to cleave the non-complementary strand of a double stranded guide target sequence (thus resulting in a single strand break (SSB) instead of a double strand break (DSB) when the variant Cas9 protein cleaves a double stranded target nucleic acid) (see, for example, Jinek et al., Science. 2012 Aug. 17; 337(6096):816-21).

[0211] In some cases, a variant Cas9 protein can cleave the non-complementary strand of a double stranded guide target sequence but has reduced ability to cleave the complementary strand of the guide target sequence. For example, the variant Cas9 protein can have a mutation (amino acid substitution) that reduces the function of the HNH domain (RuvC/HNH/RuvC domain motifs). As a non-limiting example, in some embodiments, the variant Cas9 protein has an H840A (histidine to alanine at amino acid position 840) mutation and can therefore cleave the non-complementary strand of the guide target sequence but has reduced ability to cleave the complementary strand of the guide target sequence (thus resulting in a SSB instead of a DSB when the variant Cas9 protein cleaves a double stranded guide target sequence). Such a Cas9 protein has a reduced ability to cleave a guide target sequence (e.g., a single stranded guide target sequence) but retains the ability to bind a guide target sequence (e.g., a single stranded guide target sequence).

[0212] In some cases, a variant Cas9 protein has a reduced ability to cleave both the complementary and the non-complementary strands of a double stranded target DNA. As a non-limiting example, in some cases, the variant Cas9 protein harbors both the D10A and the H840A mutations such that the polypeptide has a reduced ability to cleave both the complementary and the non-complementary strands of a double stranded target DNA. Such a Cas9 protein has a reduced ability to cleave a target DNA (e.g., a single stranded target DNA) but retains the ability to bind a target DNA (e.g., a single stranded target DNA).

[0213] As another non-limiting example, in some cases, the variant Cas9 protein harbors W476A and W1126A mutations such that the polypeptide has a reduced ability to cleave a target DNA. Such a Cas9 protein has a reduced ability to cleave a target DNA (e.g., a single stranded target DNA) but retains the ability to bind a target DNA (e.g., a single stranded target DNA).

[0214] As another non-limiting example, in some cases, the variant Cas9 protein harbors P475A, W476A, N477A, D1125A, W1126A, and D1127A mutations such that the polypeptide has a reduced ability to cleave a target DNA. Such a Cas9 protein has a reduced ability to cleave a target DNA (e.g., a single stranded target DNA) but retains the ability to bind a target DNA (e.g., a single stranded target DNA).

[0215] As another non-limiting example, in some cases, the variant Cas9 protein harbors H840A, W476A, and W1126A, mutations such that the polypeptide has a reduced ability to cleave a target DNA. Such a Cas9 protein has a reduced ability to cleave a target DNA (e.g., a single stranded target DNA) but retains the ability to bind a target DNA (e.g., a single stranded target DNA). As another non-limiting example, in some cases, the variant Cas9 protein harbors H840A, D10A, W476A, and W1126A, mutations such that the polypeptide has a reduced ability to cleave a target DNA. Such a Cas9 protein has a reduced ability to cleave a target DNA (e.g., a single stranded target DNA) but retains the ability to bind a target DNA (e.g., a single stranded target DNA). In some embodiments, the variant Cas9 has restored catalytic His residue at position 840 in the Cas9 HNH domain (A840H).

[0216] As another non-limiting example, in some cases, the variant Cas9 protein harbors, H840A, P475A, W476A, N477A, D1125A, W1126A, and D1127A mutations such that the polypeptide has a reduced ability to cleave a target DNA. Such a Cas9 protein has a reduced ability to cleave a target DNA (e.g., a single stranded target DNA) but retains the ability to bind a target DNA (e.g., a single stranded target DNA). As another non-limiting example, in some cases, the variant Cas9 protein harbors D10A, H840A, P475A, W476A, N477A, D1125A, W1126A, and D1127A mutations such that the polypeptide has a reduced ability to cleave a target DNA. Such a Cas9 protein has a reduced ability to cleave a target DNA (e.g., a single stranded target DNA) but retains the ability to bind a target DNA (e.g., a single stranded target DNA). In some cases, when a variant Cas9 protein harbors W476A and W1126A mutations or when the variant Cas9 protein harbors P475A, W476A, N477A, D1125A, W1126A, and D1127A mutations, the variant Cas9 protein does not bind efficiently to a PAM sequence. Thus, in some such cases, when such a variant Cas9 protein is used in a method of binding, the method does not require a PAM sequence. In other words, in some cases, when such a variant Cas9 protein is used in a method of binding, the method can include a guide RNA, but the method can be performed in the absence of a PAM sequence (and the specificity of binding is therefore provided by the targeting segment of the guide RNA). Other residues can be mutated to achieve the above effects (i.e., inactivate one or the other nuclease portions). As non-limiting examples, residues D10, G12, G17, E762, H840, N854, N863, H982, H983, A984, D986, and/or A987 can be altered (i.e., substituted). Also, mutations other than alanine substitutions are suitable.

[0217] In some embodiments, a variant Cas9 protein that has reduced catalytic activity (e.g., when a Cas9 protein has a D10, G12, G17, E762, H840, N854, N863, H982, H983, A984, D986, and/or a A987 mutation, e.g., D10A, G12A, G17A, E762A, H840A, N854A, N863A, H982A, H983A, A984A, and/or D986A), the variant Cas9 protein can still bind to target DNA in a site-specific manner (because it is still guided to a target DNA sequence by a guide RNA) as long as it retains the ability to interact with the guide RNA.

[0218] In some embodiments, the variant Cas protein can be spCas9, spCas9-VRQR, spCas9-VRER, xCas9 (sp), saCas9, saCas9-KKH, spCas9-MQKSER, spCas9-LRKIQK, or spCas9-LRVSQL.

[0219] Alternatives to S. pyogenes Cas9 can include RNA-guided endonucleases from the Cpf1 family that display cleavage activity in mammalian cells. CRISPR from Prevotella and Francisella 1 (CRISPR/Cpf1) is a DNA-editing technology analogous to the CRISPR/Cas9 system. Cpf1 is an RNA-guided endonuclease of a class II CRISPR/Cas system. This acquired immune mechanism is found in Prevotella and Francisella bacteria. Cpf1 genes are associated with the CRISPR locus, coding for an endonuclease that use a guide RNA to find and cleave viral DNA. Cpf1 is a smaller and simpler endonuclease than Cas9, overcoming some of the CRISPR/Cas9 system limitations. Unlike Cas9 nucleases, the result of Cpf1-mediated DNA cleavage is a double-strand break with a short 3′ overhang. Cpf1's staggered cleavage pattern can open up the possibility of directional gene transfer, analogous to traditional restriction enzyme cloning, which can increase the efficiency of gene editing. Like the Cas9 variants and orthologues described above, Cpf1 can also expand the number of sites that can be targeted by CRISPR to AT-rich regions or AT-rich genomes that lack the NGG PAM sites favored by SpCas9. The Cpf1 locus contains a mixed alpha/beta domain, a RuvC-I followed by a helical region, a RuvC-II and a zinc finger-like domain. The Cpf1 protein has a RuvC-like endonuclease domain that is similar to the RuvC domain of Cas9. Furthermore, Cpf1 does not have a HNH endonuclease domain, and the N-terminal of Cpf1 does not have the alpha-helical recognition lobe of Cas9. Cpf1 CRISPR-Cas domain architecture shows that Cpf1 is functionally unique, being classified as Class 2, type V CRISPR system. The Cpf1 loci encode Cast, Cas2 and Cas4 proteins more similar to types I and III than from type II systems. Functional Cpf1 doesn't need the trans-activating CRISPR RNA (tracrRNA), therefore, only CRISPR (crRNA) is required. This benefits genome editing because Cpf1 is not only smaller than Cas9, but also it has a smaller sgRNA molecule (proximately half as many nucleotides as Cas9). The Cpf1-crRNA complex cleaves target DNA or RNA by identification of a protospacer adjacent motif 5′-YTN-3′ in contrast to the G-rich PAM targeted by Cas9. After identification of PAM, Cpf1 introduces a sticky-end-like DNA double-stranded break of 4 or 5 nucleotides overhang.

[0220] Some aspects of the disclosure provide fusion proteins comprising domains that act as nucleic acid programmable DNA binding proteins, which may be used to guide a protein, such as a base editor, to a specific nucleic acid (e.g., DNA or RNA) sequence. In particular embodiments, a fusion protein comprises a nucleic acid programmable DNA binding protein domain and a deaminase domain. DNA binding proteins include, without limitation, Cas9 (e.g., dCas9 and nCas9), Cas12a/Cpf1, Cas12b/C2c1, Cas12c/C2c3, Cas12d/CasY, Cas12e/CasX, Cas12g, Cas12h, and Cas12i. One example of a programmable polynucleotide-binding protein that has different PAM specificity than Cas9 is Clustered Regularly Interspaced Short Palindromic Repeats from Prevotella and Francisella1 (Cpf1). Similar to Cas9, Cpf1 is also a class 2 CRISPR effector. It has been shown that Cpf1 mediates robust DNA interference with features distinct from Cas9. Cpf1 is a single RNA-guided endonuclease lacking tracrRNA, and it utilizes a T-rich protospacer-adjacent motif (TTN, TTTN, or YTN). Moreover, Cpf1 cleaves DNA via a staggered DNA double-stranded break. Out of 16 Cpf1-family proteins, two enzymes from Acidaminococcus and Lachnospiraceae are shown to have efficient genome-editing activity in human cells. Cpf1 proteins are known in the art and have been described previously, for example Yamano et al., “Crystal structure of Cpf1 in complex with guide RNA and target DNA.” Cell (165) 2016, p. 949-962; the entire contents of which is hereby incorporated by reference.

[0221] Also useful in the present compositions and methods are nuclease-inactive Cpf1 (dCpf1) variants that may be used as a guide nucleotide sequence-programmable polynucleotide-binding protein domain. The Cpf1 protein has a RuvC-like endonuclease domain that is similar to the RuvC domain of Cas9 but does not have a HNH endonuclease domain, and the N-terminal of Cpf1 does not have the alfa-helical recognition lobe of Cas9. It was shown in Zetsche et al., Cell, 163, 759-771, 2015 (which is incorporated herein by reference) that, the RuvC-like domain of Cpf1 is responsible for cleaving both DNA strands and inactivation of the RuvC-like domain inactivates Cpf1 nuclease activity. For example, mutations corresponding to D917A, E1006A, or D1255A in Francisella novicida Cpf1 inactivate Cpf1 nuclease activity. In some embodiments, the dCpf1 of the present disclosure comprises mutations corresponding to D917A, E1006A, D1255A, D917A/E1006A, D917A/D1255A, E1006A/D1255A, or D917A/E1006A/D1255A. It is to be understood that any mutations, e.g., substitution mutations, deletions, or insertions that inactivate the RuvC domain of Cpf1, may be used in accordance with the present disclosure.

[0222] In some embodiments, the nucleic acid programmable nucleotide binding protein of any of the fusion proteins provided herein may be a Cpf1 protein. In some embodiments, the Cpf1 protein is a Cpf1 nickase (nCpf1). In some embodiments, the Cpf1 protein is a nuclease inactive Cpf1 (dCpf1). In some embodiments, the Cpf1, the nCpf1, or the dCpf1 comprises an amino acid sequence that is at least 85%, at least 90%, at least 91%, at least 92%, at least 93%, at least 94%, at least 95%, at least 96%, at least 97%, at least 98%, at least 99%, or at least 99.5% identical to a Cpf1 sequence disclosed herein. In some embodiments, the dCpf1 comprises an amino acid sequence that is at least 85%, at least 90%, at least 91%, at least 92%, at least 93%, at least 94%, at least 95%, at least 96%, at least 97%, at least 98%, at least 99%, or at ease 99.5% identical to a Cpf1 sequence disclosed herein, and comprises mutations corresponding to D917A, E1006A, D1255A, D917A/E1006A, D917A/D1255A, E1006A/D1255A, or D917A/E1006A/D1255A. It should be appreciated that Cpf1 from other bacterial species may also be used in accordance with the present disclosure.

[0223] The amino acid sequence of wild type Francisella novicida Cpf1 follows. D917, E1006, and D1255 are bolded and underlined.

(SEQ ID NO: 67)
MSIYQEFVNKYSLSKTLRFELIPQGKTLENIKARG
LILDDEKRAKDYKKAKQIIDKYHQFFIEEILSSVC
ISEDLLQNYSDVYFKLKKSDDDNLQKDFKSAKDTI
KKQISEYIKDSEKFKNLFNQNLIDAKKGQESDLIL
WLKQSKDNGIELFKANSDITDIDEALEIIKSFKGW
TTYFKGFHENRKNVYSSNDIPTSIIYRIVDDNLPK
FLENKAKYESLKDKAPEAINYEQIKKDLAEELTFD
IDYKTSEVNQRVFSLDEVFEIANFNNYLNQSGITK
FNTIIGGKFVNGENTKRKGINEYINLYSQQINDKT
LKKYKMSVLFKQILSDTESKSFVIDKLEDDSDVVT
TMQSFYEQIAAFKTVEEKSIKETLSLLFDDLKAQK
LDLSKIYFKNDKSLTDLSQQVFDDYSVIGTAVLEY
ITQQIAPKNLDNPSKKEQELIAKKTEKAKYLSLET
IKLALEEFNKHRDIDKQCRFEEILANFAAIPMIFD
EIAQNKDNLAQISIKYQNQGKKDLLQASAEDDVKA
IKDLLDQTNNLLHKLKIFHISQSEDKANILDKDEH
FYLVFEECYFELANIVPLYNKIRNYITQKPYSDEK
FKLNFENSTLANGWDKNKEPDNTAILFIKDDKYYL
GVMNKKNNKIFDDKAIKENKGEGYKKIVYKLLPGA
NKMLPKVFFSAKSIKFYNPSEDILRIRNHSTHTKN
GSPQKGYEKFEFNIEDCRKFIDFYKQSISKHPEWK
DFGFRFSDTQRYNSIDEFYREVENQGYKLTFENIS
ESYIDSVVNQGKLYLFQIYNKDFSAYSKGRPNLHT
LYWKALFDERNLQDVVYKLNGEAELFYRKQSIPKK
ITHPAKEAIANKNKDNPKKESVFEYDLIKDKRFTE
DKFFFHCPITINFKSSGANKFNDEINLLLKEKAND
VHILSIDRGERHLAYYTLVDGKGNIIKQDTFNIIG
NDRMKTNYHDKLAAIEKDRDSARKDWKKINNIKEM
KEGYLSQVVHEIAKLVIEYNAIVVFEDLNFGFKRG
RFKVEKQVYQKLEKMLIEKLNYLVFKDNEFDKTGG
VLRAYQLTAPFETFKKMGKQTGIIYYVPAGFTSKI
CPVTGFVNQLYPKYESVSKSQEFFSKFDKICYNLD
KGYFEFSFDYKNFGDKAAKGKWTIASFGSRLINFR
NSDKNHNWDTREVYPTKELEKLLKDYSIEYGHGEC
IKAAICGESDKKFFAKLTSVLNTILQMRNSKTGTE
LDYLISPVADVNGNFFDSRQAPKNMPQDADANGAY
HIGLKGLMLLGRIKNNQEGKKLNLVIKNEEYFEFV
QNRNN.

[0224] The amino acid sequence of Francisella novicida Cpf1 D917A follows. (A917, E1006, and D1255 are bolded and underlined).

(SEQ ID NO: 68)
MSIYQEFVNKYSLSKTLRFELIPQGKTLENIKARG
LILDDEKRAKDYKKAKQIIDKYHQFFIEEILSSVC
ISEDLLQNYSDVYFKLKKSDDDNLQKDFKSAKDTI
KKQISEYIKDSEKFKNLFNQNLIDAKKGQESDLIL
WLKQSKDNGIELFKANSDITDIDEALEIIKSFKGW
TTYFKGFHENRKNVYSSNDIPTSIIYRIVDDNLPK
FLENKAKYESLKDKAPEAINYEQIKKDLAEELTFD
IDYKTSEVNQRVFSLDEVFEIANFNNYLNQSGITK
FNTIIGGKFVNGENTKRKGINEYINLYSQQINDKT
LKKYKMSVLFKQILSDTESKSFVIDKLEDDSDVVT
TMQSFYEQIAAFKTVEEKSIKETLSLLFDDLKAQK
LDLSKIYFKNDKSLTDLSQQVFDDYSVIGTAVLEY
ITQQIAPKNLDNPSKKEQELIAKKTEKAKYLSLET
IKLALEEFNKHRDIDKQCRFEEILANFAAIPMIFD
EIAQNKDNLAQISIKYQNQGKKDLLQASAEDDVKA
IKDLLDQTNNLLHKLKIFHISQSEDKANILDKDEH
FYLVFEECYFELANIVPLYNKIRNYITQKPYSDEK
FKLNFENSTLANGWDKNKEPDNTAILFIKDDKYYL
GVMNKKNNKIFDDKAIKENKGEGYKKIVYKLLPGA
NKMLPKVFFSAKSIKFYNPSEDILRIRNHSTHTKN
GSPQKGYEKFEFNIEDCRKFIDFYKQSISKHPEWK
DFGFRFSDTQRYNSIDEFYREVENQGYKLTFENIS
ESYIDSVVNQGKLYLFQIYNKDFSAYSKGRPNLHT
LYWKALFDERNLQDVVYKLNGEAELFYRKQSIPKK
ITHPAKEAIANKNKDNPKKESVFEYDLIKDKRFTE
DKFFFHCPITINFKSSGANKFNDEINLLLKEKAND
VHILSIARGERHLAYYTLVDGKGNIIKQDTFNIIG
NDRMKTNYHDKLAAIEKDRDSARKDWKKINNIKEM
KEGYLSQVVHEIAKLVIEYNAIVVFEDLNFGFKRG
RFKVEKQVYQKLEKMLIEKLNYLVFKDNEFDKTGG
VLRAYQLTAPFETFKKMGKQTGIIYYVPAGFTSKI
CPVTGFVNQLYPKYESVSKSQEFFSKFDKICYNLD
KGYFEFSFDYKNFGDKAAKGKWTIASFGSRLINFR
NSDKNHNWDTREVYPTKELEKLLKDYSIEYGHGEC
IKAAICGESDKKFFAKLTSVLNTILQMRNSKTGTE
LDYLISPVADVNGNFFDSRQAPKNMPQDADANGAY
HIGLKGLMLLGRIKNNQEGKKLNLVIKNEEYFEFV
QNRNN.

[0225] The amino acid sequence of Francisella novicida Cpf1 E1006A follows. (D917, A1006, and D1255 are bolded and underlined).

(SEQ ID NO: 69)
MSIYQEFVNKYSLSKTLRFELIPQGKTLENIKARG
LILDDEKRAKDYKKAKQIIDKYHQFFIEEILSSVC
ISEDLLQNYSDVYFKLKKSDDDNLQKDFKSAKDTI
KKQISEYIKDSEKFKNLFNQNLIDAKKGQESDLIL
WLKQSKDNGIELFKANSDITDIDEALEIIKSFKGW
TTYFKGFHENRKNVYSSNDIPTSIIYRIVDDNLPK
FLENKAKYESLKDKAPEAINYEQIKKDLAEELTFD
IDYKTSEVNQRVFSLDEVFEIANFNNYLNQSGITK
FNTIIGGKFVNGENTKRKGINEYINLYSQQINDKT
LKKYKMSVLFKQILSDTESKSFVIDKLEDDSDVVT
TMQSFYEQIAAFKTVEEKSIKETLSLLFDDLKAQK
LDLSKIYFKNDKSLTDLSQQVFDDYSVIGTAVLEY
ITQQIAPKNLDNPSKKEQELIAKKTEKAKYLSLET
IKLALEEFNKHRDIDKQCRFEEILANFAAIPMIFD
EIAQNKDNLAQISIKYQNQGKKDLLQASAEDDVKA
IKDLLDQTNNLLHKLKIFHISQSEDKANILDKDEH
FYLVFEECYFELANIVPLYNKIRNYITQKPYSDEK
FKLNFENSTLANGWDKNKEPDNTAILFIKDDKYYL
GVMNKKNNKIFDDKAIKENKGEGYKKIVYKLLPGA
NKMLPKVFFSAKSIKFYNPSEDILRIRNHSTHTKN
GSPQKGYEKFEFNIEDCRKFIDFYKQSISKHPEWK
DFGFRFSDTQRYNSIDEFYREVENQGYKLTFENIS
ESYIDSVVNQGKLYLFQIYNKDFSAYSKGRPNLHT
LYWKALFDERNLQDVVYKLNGEAELFYRKQSIPKK
ITHPAKEAIANKNKDNPKKESVFEYDLIKDKRFTE
DKFFFHCPITINFKSSGANKFNDEINLLLKEKAND
VHILSIDRGERHLAYYTLVDGKGNIIKQDTFNIIG
NDRMKTNYHDKLAAIEKDRDSARKDWKKINNIKEM
KEGYLSQVVHEIAKLVIEYNAIVVFADLNFGFKRG
RFKVEKQVYQKLEKMLIEKLNYLVFKDNEFDKTGG
VLRAYQLTAPFETFKKMGKQTGIIYYVPAGFTSKI
CPVTGFVNQLYPKYESVSKSQEFFSKFDKICYNLD
KGYFEFSFDYKNFGDKAAKGKWTIASFGSRLINFR
NSDKNHNWDTREVYPTKELEKLLKDYSIEYGHGEC
IKAAICGESDKKFFAKLTSVLNTILQMRNSKTGTE
LDYLISPVADVNGNFFDSRQAPKNMPQDADANGAY
HIGLKGLMLLGRIKNNQEGKKLNLVIKNEEYFEFV
QNRNN.

[0226] The amino acid sequence of Francisella novicida Cpf1 D1255A follows. (D917, E1006, and A1255 mutation positions are bolded and underlined).

(SEQ ID NO: 70)
MSIYQEFVNKYSLSKTLRFELIPQGKTLENIKARG
LILDDEKRAKDYKKAKQIIDKYHQFFIEEILSSVC
ISEDLLQNYSDVYFKLKKSDDDNLQKDFKSAKDTI
KKQISEYIKDSEKFKNLFNQNLIDAKKGQESDLIL
WLKQSKDNGIELFKANSDITDIDEALEIIKSFKGW
TTYFKGFHENRKNVYSSNDIPTSIIYRIVDDNLPK
FLENKAKYESLKDKAPEAINYEQIKKDLAEELTFD
IDYKTSEVNQRVFSLDEVFEIANFNNYLNQSGITK
FNTIIGGKFVNGENTKRKGINEYINLYSQQINDKT
LKKYKMSVLFKQILSDTESKSFVIDKLEDDSDVVT
TMQSFYEQIAAFKTVEEKSIKETLSLLFDDLKAQK
LDLSKIYFKNDKSLTDLSQQVFDDYSVIGTAVLEY
ITQQIAPKNLDNPSKKEQELIAKKTEKAKYLSLET
IKLALEEFNKHRDIDKQCRFEEILANFAAIPMIFD
EIAQNKDNLAQISIKYQNQGKKDLLQASAEDDVKA
IKDLLDQTNNLLHKLKIFHISQSEDKANILDKDEH
FYLVFEECYFELANIVPLYNKIRNYITQKPYSDEK
FKLNFENSTLANGWDKNKEPDNTAILFIKDDKYYL
GVMNKKNNKIFDDKAIKENKGEGYKKIVYKLLPGA
NKMLPKVFFSAKSIKFYNPSEDILRIRNHSTHTKN
GSPQKGYEKFEFNIEDCRKFIDFYKQSISKHPEWK
DFGFRFSDTQRYNSIDEFYREVENQGYKLTFENIS
ESYIDSVVNQGKLYLFQIYNKDFSAYSKGRPNLHT
LYWKALFDERNLQDVVYKLNGEAELFYRKQSIPKK
ITHPAKEAIANKNKDNPKKESVFEYDLIKDKRFTE
DKFFFHCPITINFKSSGANKFNDEINLLLKEKAND
VHILSIDRGERHLAYYTLVDGKGNIIKQDTFNIIG
NDRMKTNYHDKLAAIEKDRDSARKDWKKINNIKEM
KEGYLSQVVHEIAKLVIEYNAIVVFEDLNFGFKRG
RFKVEKQVYQKLEKMLIEKLNYLVFKDNEFDKTGG
VLRAYQLTAPFETFKKMGKQTGIIYYVPAGFTSKI
CPVTGFVNQLYPKYESVSKSQEFFSKFDKICYNLD
KGYFEFSFDYKNFGDKAAKGKWTIASFGSRLINFR
NSDKNHNWDTREVYPTKELEKLLKDYSIEYGHGEC
IKAAICGESDKKFFAKLTSVLNTILQMRNSKTGTE
LDYLISPVADVNGNFFDSRQAPKNMPQDAAANGAY
HIGLKGLMLLGRIKNNQEGKKLNLVIKNEEYFEFV
QNRNN

[0227] The amino acid sequence of Francisella novicida Cpf1 D917A/E1006A follows. (A917, A1006, and D1255 are bolded and underlined).

(SEQ ID NO: 71)
MSIYQEFVNKYSLSKTLRFELIPQGKTLENIKARG
LILDDEKRAKDYKKAKQIIDKYHQFFIEEILSSVC
ISEDLLQNYSDVYFKLKKSDDDNLQKDFKSAKDTI
KKQISEYIKDSEKFKNLFNQNLIDAKKGQESDLIL
WLKQSKDNGIELFKANSDITDIDEALEIIKSFKGW
TTYFKGFHENRKNVYSSNDIPTSIIYRIVDDNLPK
FLENKAKYESLKDKAPEAINYEQIKKDLAEELTFD
IDYKTSEVNQRVFSLDEVFEIANFNNYLNQSGITK
FNTIIGGKFVNGENTKRKGINEYINLYSQQINDKT
LKKYKMSVLFKQILSDTESKSFVIDKLEDDSDVVT
TMQSFYEQIAAFKTVEEKSIKETLSLLFDDLKAQK
LDLSKIYFKNDKSLTDLSQQVFDDYSVIGTAVLEY
ITQQIAPKNLDNPSKKEQELIAKKTEKAKYLSLET
IKLALEEFNKHRDIDKQCRFEEILANFAAIPMIFD
EIAQNKDNLAQISIKYQNQGKKDLLQASAEDDVKA
IKDLLDQTNNLLHKLKIFHISQSEDKANILDKDEH
FYLVFEECYFELANIVPLYNKIRNYITQKPYSDEK
FKLNFENSTLANGWDKNKEPDNTAILFIKDDKYYL
GVMNKKNNKIFDDKAIKENKGEGYKKIVYKLLPGA
NKMLPKVFFSAKSIKFYNPSEDILRIRNHSTHTKN
GSPQKGYEKFEFNIEDCRKFIDFYKQSISKHPEWK
DFGFRFSDTQRYNSIDEFYREVENQGYKLTFENIS
ESYIDSVVNQGKLYLFQIYNKDFSAYSKGRPNLHT
LYWKALFDERNLQDVVYKLNGEAELFYRKQSIPKK
ITHPAKEAIANKNKDNPKKESVFEYDLIKDKRFTE
DKFFFHCPITINFKSSGANKFNDEINLLLKEKAND
VHILSIARGERHLAYYTLVDGKGNIIKQDTFNIIG
NDRMKTNYHDKLAAIEKDRDSARKDWKKINNIKEM
KEGYLSQVVHEIAKLVIEYNAIVVFADLNFGFKRG
RFKVEKQVYQKLEKMLIEKLNYLVFKDNEFDKTGG
VLRAYQLTAPFETFKKMGKQTGIIYYVPAGFTSKI
CPVTGFVNQLYPKYESVSKSQEFFSKFDKICYNLD
KGYFEFSFDYKNFGDKAAKGKWTIASFGSRLINFR
NSDKNHNWDTREVYPTKELEKLLKDYSIEYGHGEC
IKAAICGESDKKFFAKLTSVLNTILQMRNSKTGTE
LDYLISPVADVNGNFFDSRQAPKNMPQDADANGAY
HIGLKGLMLLGRIKNNQEGKKLNLVIKNEEYFEFV
QNRNN.

[0228] The amino acid sequence of Francisella novicida Cpf1 D917A/D1255A follows. (A917, E1006, and A1255 are bolded and underlined).

(SEQ ID NO: 72)
MSIYQEFVNKYSLSKTLRFELIPQGKTLENIKARG
LILDDEKRAKDYKKAKQIIDKYHQFFIEEILSSVC
ISEDLLQNYSDVYFKLKKSDDDNLQKDFKSAKDTI
KKQISEYIKDSEKFKNLFNQNLIDAKKGQESDLIL
WLKQSKDNGIELFKANSDITDIDEALEIIKSFKGW
TTYFKGFHENRKNVYSSNDIPTSIIYRIVDDNLPK
FLENKAKYESLKDKAPEAINYEQIKKDLAEELTFD
IDYKTSEVNQRVFSLDEVFEIANFNNYLNQSGITK
FNTIIGGKFVNGENTKRKGINEYINLYSQQINDKT
LKKYKMSVLFKQILSDTESKSFVIDKLEDDSDVVT
TMQSFYEQIAAFKTVEEKSIKETLSLLFDDLKAQK
LDLSKIYFKNDKSLTDLSQQVFDDYSVIGTAVLEY
ITQQIAPKNLDNPSKKEQELIAKKTEKAKYLSLET
IKLALEEFNKHRDIDKQCRFEEILANFAAIPMIFD
EIAQNKDNLAQISIKYQNQGKKDLLQASAEDDVKA
IKDLLDQTNNLLHKLKIFHISQSEDKANILDKDEH
FYLVFEECYFELANIVPLYNKIRNYITQKPYSDEK
FKLNFENSTLANGWDKNKEPDNTAILFIKDDKYYL
GVMNKKNNKIFDDKAIKENKGEGYKKIVYKLLPGA
NKMLPKVFFSAKSIKFYNPSEDILRIRNHSTHTKN
GSPQKGYEKFEFNIEDCRKFIDFYKQSISKHPEWK
DFGFRFSDTQRYNSIDEFYREVENQGYKLTFENIS
ESYIDSVVNQGKLYLFQIYNKDFSAYSKGRPNLHT
LYWKALFDERNLQDVVYKLNGEAELFYRKQSIPKK
ITHPAKEAIANKNKDNPKKESVFEYDLIKDKRFTE
DKFFFHCPITINFKSSGANKFNDEINLLLKEKAND
VHILSIARGERHLAYYTLVDGKGNIIKQDTFNIIG
NDRMKTNYHDKLAAIEKDRDSARKDWKKINNIKEM
KEGYLSQVVHEIAKLVIEYNAIVVFEDLNFGFKRG
RFKVEKQVYQKLEKMLIEKLNYLVFKDNEFDKTGG
VLRAYQLTAPFETFKKMGKQTGIIYYVPAGFTSKI
CPVTGFVNQLYPKYESVSKSQEFFSKFDKICYNLD
KGYFEFSFDYKNFGDKAAKGKWTIASFGSRLINFR
NSDKNHNWDTREVYPTKELEKLLKDYSIEYGHGEC
IKAAICGESDKKFFAKLTSVLNTILQMRNSKTGTE
LDYLISPVADVNGNFFDSRQAPKNMPQDAAANGAY
HIGLKGLMLLGRIKNNQEGKKLNLVIKNEEYFEFV
QNRNN.

[0229] The amino acid sequence of Francisella novicida Cpf1 E1006A/D1255A follows. (D917, A1006, and A1255 are bolded and underlined).

(SEQ ID NO: 73)
MSIYQEFVNKYSLSKTLRFELIPQGKTLENIKARG
LILDDEKRAKDYKKAKQIIDKYHQFFIEEILSSVC
ISEDLLQNYSDVYFKLKKSDDDNLQKDFKSAKDTI
KKQISEYIKDSEKFKNLFNQNLIDAKKGQESDLIL
WLKQSKDNGIELFKANSDITDIDEALEIIKSFKGW
TTYFKGFHENRKNVYSSNDIPTSIIYRIVDDNLPK
FLENKAKYESLKDKAPEAINYEQIKKDLAEELTFD
IDYKTSEVNQRVFSLDEVFEIANFNNYLNQSGITK
FNTIIGGKFVNGENTKRKGINEYINLYSQQINDKT
LKKYKMSVLFKQILSDTESKSFVIDKLEDDSDVVT
TMQSFYEQIAAFKTVEEKSIKETLSLLFDDLKAQK
LDLSKIYFKNDKSLTDLSQQVFDDYSVIGTAVLEY
ITQQIAPKNLDNPSKKEQELIAKKTEKAKYLSLET
IKLALEEFNKHRDIDKQCRFEEILANFAAIPMIFD
EIAQNKDNLAQISIKYQNQGKKDLLQASAEDDVKA
IKDLLDQTNNLLHKLKIFHISQSEDKANILDKDEH
FYLVFEECYFELANIVPLYNKIRNYITQKPYSDEK
FKLNFENSTLANGWDKNKEPDNTAILFIKDDKYYL
GVMNKKNNKIFDDKAIKENKGEGYKKIVYKLLPGA
NKMLPKVFFSAKSIKFYNPSEDILRIRNHSTHTKN
GSPQKGYEKFEFNIEDCRKFIDFYKQSISKHPEWK
DFGFRFSDTQRYNSIDEFYREVENQGYKLTFENIS
ESYIDSVVNQGKLYLFQIYNKDFSAYSKGRPNLHT
LYWKALFDERNLQDVVYKLNGEAELFYRKQSIPKK
ITHPAKEAIANKNKDNPKKESVFEYDLIKDKRFTE
DKFFFHCPITINFKSSGANKFNDEINLLLKEKAND
VHILSIDRGERHLAYYTLVDGKGNIIKQDTFNIIG
NDRMKTNYHDKLAAIEKDRDSARKDWKKINNIKEM
KEGYLSQVVHEIAKLVIEYNAIVVFADLNFGFKRG
RFKVEKQVYQKLEKMLIEKLNYLVFKDNEFDKTGG
VLRAYQLTAPFETFKKMGKQTGIIYYVPAGFTSKI
CPVTGFVNQLYPKYESVSKSQEFFSKFDKICYNLD
KGYFEFSFDYKNFGDKAAKGKWTIASFGSRLINFR
NSDKNHNWDTREVYPTKELEKLLKDYSIEYGHGEC
IKAAICGESDKKFFAKLTSVLNTILQMRNSKTGTE
LDYLISPVADVNGNFFDSRQAPKNMPQDAAANGAY
HIGLKGLMLLGRIKNNQEGKKLNLVIKNEEYFEFV
QNRNN.

[0230] The amino acid sequence of Francisella novicida Cpf1 D917A/E1006A/D1255A follows. (A917, A1006, and A1255 are bolded and underlined).

(SEQ ID NO: 74)
MSIYQEFVNKYSLSKTLRFELIPQGKTLENIKARG
LILDDEKRAKDYKKAKQIIDKYHQFFIEEILSSVC
ISEDLLQNYSDVYFKLKKSDDDNLQKDFKSAKDTI
KKQISEYIKDSEKFKNLFNQNLIDAKKGQESDLIL
WLKQSKDNGIELFKANSDITDIDEALEIIKSFKGW
TTYFKGFHENRKNVYSSNDIPTSIIYRIVDDNLPK
FLENKAKYESLKDKAPEAINYEQIKKDLAEELTFD
IDYKTSEVNQRVFSLDEVFEIANFNNYLNQSGITK
FNTIIGGKFVNGENTKRKGINEYINLYSQQINDKT
LKKYKMSVLFKQILSDTESKSFVIDKLEDDSDVVT
TMQSFYEQIAAFKTVEEKSIKETLSLLFDDLKAQK
LDLSKIYFKNDKSLTDLSQQVFDDYSVIGTAVLEY
ITQQIAPKNLDNPSKKEQELIAKKTEKAKYLSLET
IKLALEEFNKHRDIDKQCRFEEILANFAAIPMIFD
EIAQNKDNLAQISIKYQNQGKKDLLQASAEDDVKA
IKDLLDQTNNLLHKLKIFHISQSEDKANILDKDEH
FYLVFEECYFELANIVPLYNKIRNYITQKPYSDEK
FKLNFENSTLANGWDKNKEPDNTAILFIKDDKYYL
GVMNKKNNKIFDDKAIKENKGEGYKKIVYKLLPGA
NKMLPKVFFSAKSIKFYNPSEDILRIRNHSTHTKN
GSPQKGYEKFEFNIEDCRKFIDFYKQSISKHPEWK
DFGFRFSDTQRYNSIDEFYREVENQGYKLTFENIS
ESYIDSVVNQGKLYLFQIYNKDFSAYSKGRPNLHT
LYWKALFDERNLQDVVYKLNGEAELFYRKQSIPKK
ITHPAKEAIANKNKDNPKKESVFEYDLIKDKRFTE
DKFFFHCPITINFKSSGANKFNDEINLLLKEKAND
VHILSIARGERHLAYY
TLVDGKGNIIKQDTFNIIGNDRMKTNYHDKLAAIE
KDRDSARKDWKKINNIKEMKEGYLSQVVHEIAKLV
IEYNAIVVFADLNFGFKRGRFKVEKQVYQKLEKML
IEKLNYLVFKDNEFDKTGGVLRAYQLTAPFETFKK
MGKQTGIIYYVPAGFTSKICPVTGFVNQLYPKYES
VSKSQEFFSKFDKICYNLDKGYFEFSFDYKNFGDK
AAKGKWTIASFGSRLINFRNSDKNHNWDTREVYPT
KELEKLLKDYSIEYGHGECIKAAICGESDKKFFAK
LTSVLNTILQMRNSKTGTELDYLISPVADVNGNFF
DSRQAPKNMPQDAAANGAYHIGLKGLMLLGRIKNN
QEGKKLNLVIKNEEYFEFVQNRNN.

[0231] In some embodiments, one of the Cas9 domains present in the fusion protein may be replaced with a guide nucleotide sequence-programmable DNA-binding protein domain that has no requirements for a PAM sequence.

[0232] In some embodiments, the Cas domain is a Cas9 domain from Staphylococcus aureus (SaCas9). In some embodiments, the SaCas9 domain is a nuclease active SaCas9, a nuclease inactive SaCas9 (SaCas9d), or a SaCas9 nickase (SaCas9n). In some embodiments, the SaCas9 domain comprises a N579A mutation, or a corresponding mutation in any of the amino acid sequences provided herein.

[0233] In some embodiments, the SaCas9 domain, the SaCas9d domain, or the SaCas9n domain can bind to a nucleic acid sequence having a non-canonical PAM. In some embodiments, the SaCas9 domain, the SaCas9d domain, or the SaCas9n domain can bind to a nucleic acid sequence having a NNGRRT or a NNGRRT PAM sequence. In some embodiments, the SaCas9 domain comprises one or more of a E781X, a N967X, and a R1014X mutation, or a corresponding mutation in any of the amino acid sequences provided herein, wherein X is any amino acid. In some embodiments, the SaCas9 domain comprises one or more of a E781K, a N967K, and a R1014H mutation, or one or more corresponding mutation in any of the amino acid sequences provided herein. In some embodiments, the SaCas9 domain comprises a E781K, a N967K, or a R1014H mutation, or corresponding mutations in any of the amino acid sequences provided herein.

[0234] The amino acid sequence of an exemplary SaCas9 is as follows:

KRNYILGLDIGITSVGYGIIDYETRDVIDAGVRLFKEANVENNEGRRSKRGARRLKRRRR HRIQRVKKLLFDYNLLTDHSELSGINPYEARVKGLSQKLSEEEFSAALLHLAKRRGVHN VNEVEEDTGNELSTKEQISRNSKALEEKYVAELQLERLKKDGEVRGSINRFKTSDYVKE AKQLLKVQKAYHQLDQSFIDTYIDLLETRRTYYEGPGEGSPFGWKDIKEWYEMLMGHC TYFPEELRSVKYAYNADLYNALNDLNNLVITRDENEKLEYYEKFQIIENVFKQKKKPTL KQIAKEILVNEEDIKGYRVTSTGKPEFTNLKVYHDIKDITARKEIIENAELLDQIAKILTIY QSSEDIQEELTNLNSELTQEEIEQISNLKGYTGTHNLSLKAINLILDELWHTNDNQIAIFNR LKLVPKKVDLSQQKEIPTTLVDDFILSPVVKRSFIQSIKVINAIIKKYGLPNDIIIELAREKN SKDAQKMINEMQKRNRQTNERIEEIIRTTGKENAKYLIEKIKLHDMQEGKCLYSLEAIPL EDLLNNPFNYEVDHIIPRSVSFDNSFNNKVLVKQEENSKKGNRTPFQYLSSSDSKISYETF KKHILNLAKGKGRISKTKKEYLLEERDINRFSVQKDFINRNLVDTRYATRGLMNLLRSY FRVNNLDVKVKSINGGFTSFLRRKWKFKKERNKGYKHHAEDALIIANADFIFKEWKKL DKAKKVMENQMFEEKQAESMPEIETEQEYKEIFITPHQIKHIKDFKDYKYSHRVDKKPN RELINDTLYSTRKDDKGNTLIVNNLNGLYDKDNDKLKKLINKSPEKLLMYHHDPQTYQ KLKLIMEQYGDEKNPLYKYYEETGNYLTKYSKKDNGPVIKKIKYYGNKLNAHLDITDD YPNSRNKVVKLSLKPYRFDVYLDNGVYKFVTVKNLDVIKKENYYEVNSKCYEEAKKL KKISNQAEFIASFYNNDLIKINGELYRVIGVNNDLLNRIEVNMIDITYREYLENMNDKRP PRIIKTIASKTQSIKKYSTDILGNLYEVKSKKHPQIIKKG (SEQ ID NO: 75). In this sequence, residue N579, which is underlined and in bold, may be mutated (e.g., to a A579) to yield a SaCas9 nickase.

[0235] The amino acid sequence of an exemplary SaCas9n is as follows:

(SEQ ID NO: 76)
KRNYILGLDIGITSVGYGIIDYETRDVIDAGVRLF
KEANVENNEGRRSKRGARRLKRRRRHRIQRVKKLL
FDYNLLTDHSELSGINPYEARVKGLSQKLSEEEFS
AALLHLAKRRGVHNVNEVEEDTGNELSTKEQISRN
SKALEEKYVAELQLERLKKDGEVRGSINRFKTSDY
VKEAKQLLKVQKAYHQLDQSFIDTYIDLLETRRTY
YEGPGEGSPFGWKDIKEWYEMLMGHCTYFPEELRS
VKYAYNADLYNALNDLNNLVITRDENEKLEYYEKF
QIIENVFKQKKKPTLKQIAKEILVNEEDIKGYRVT
STGKPEFTNLKVYHDIKDITARKEIIENAELLDQI
AKILTIYQSSEDIQEELTNLNSELTQEEIEQISNL
KGYTGTHNLSLKAINLILDELWHTNDNQIAIFNRL
KLVPKKVDLSQQKEIPTTLVDDFILSPVVKRSFIQ
SIKVINAIIKKYGLPNDIIIELAREKNSKDAQKMI
NEMQKRNRQTNERIEEIIRTTGKENAKYLIEKIKL
HDMQEGKCLYSLEAIPLEDLLNNPFNYEVDHIIPR
SVSFDNSFNNKVLVKQEEASKKGNRTPFQYLSSSD
SKISYETFKKHILNLAKGKGRISKTKKEYLLEERD
INRFSVQKDFINRNLVDTRYATRGLMNLLRSYFRV
NNLDVKVKSINGGFTSFLRRKWKFKKERNKGYKHH
AEDALIIANADFIFKEWKKLDKAKKVMENQMFEEK
QAESMPEIETEQEYKEIFITPHQIKHIKDFKDYKY
SHRVDKKPNRELINDTLYSTRKDDKGNTLIVNNLN
GLYDKDNDKLKKLINKSPEKLLMYHHDPQTYQKLK
LIMEQYGDEKNPLYKYYEETGNYLTKYSKKDNGPV
IKKIKYYGNKLNAHLDITDDYPNSRNKVVKLSLKP
YRFDVYLDNGVYKFVTVKNLDVIKKENYYEVNSKC
YEEAKKLKKISNQAEFIASFYNNDLIKINGELYRV
IGVNNDLLNRIEVNMIDITYREYLENMNDKRPPRI
IKTIASKTQSIKKYSTDILGNLYEVKSKKHPQIIK
KG.

[0236] In this sequence, residue A579, which can be mutated from N579 to yield a SaCas9 nickase, is underlined and in bold.

[0237] The amino acid sequences of an exemplary SaKKH Cas9 is as follows:

(SEQ ID NO: 77)
KRNYILGLDIGITSVGYGIIDYETRDVIDAGVRLF
KEANVENNEGRRSKRGARRLKRRRRHRIQRVKKLL
FDYNLLTDHSELSGINPYEARVKGLSQKLSEEEFS
AALLHLAKRRGVHNVNEVEEDTGNELSTKEQISRN
SKALEEKYVAELQLERLKKDGEVRGSINRFKTSDY
VKEAKQLLKVQKAYHQLDQSFIDTYIDLLETRRTY
YEGPGEGSPFGWKDIKEWYEMLMGHCTYFPEELRS
VKYAYNADLYNALNDLNNLVITRDENEKLEYYEKF
QIIENVFKQKKKPTLKQIAKEILVNEEDIKGYRVT
STGKPEFTNLKVYHDIKDITARKEIIENAELLDQI
AKILTIYQSSEDIQEELTNLNSELTQEEIEQISNL
KGYTGTHNLSLKAINLILDELWHTNDNQIAIFNRL
KLVPKKVDLSQQKEIPTTLVDDFILSPVVKRSFIQ
SIKVINAIIKKYGLPNDIIIELAREKNSKDAQKMI
NEMQKRNRQTNERIEEIIRTTGKENAKYLIEKIKL
HDMQEGKCLYSLEAIPLEDLLNNPFNYEVDHIIPR
SVSFDNSFNNKVLVKQEEASKKGNRTPFQYLSSSD
SKISYETFKKHILNLAKGKGRISKTKKEYLLEERD
INRFSVQKDFINRNLVDTRYATRGLMNLLRSYFRV
NNLDVKVKSINGGFTSFLRRKWKFKKERNKGYKHH
AEDALIIANADFIFKEWKKLDKAKKVMENQMFEEK
QAESMPEIETEQEYKEIFITPHQIKHIKDFKDYKY
SHRVDKKPNRKLINDTLYSTRKDDKGNTLIVNNLN
GLYDKDNDKLKKLINKSPEKLLMYHHDPQTYQKLK
LIMEQYGDEKNPLYKYYEETGNYLTKYSKKDNGPV
IKKIKYYGNKLNAHLDITDDYPNSRNKVVKLSLKP
YRFDVYLDNGVYKFVTVKNLDVIKKENYYEVNSKC
YEEAKKLKKISNQAEFIASFYKNDLIKINGELYRV
IGVNNDLLNRIEVNMIDITYREYLENMNDKRPPHI
IKTIASKTQSIKKYSTDILGNLYEVKSKKHPQIIK
KG.

[0238] Residue A579 above, which can be mutated from N579 to yield a SaCas9 nickase, is underlined and in bold. Residues K781, K967, and H1014 above, which can be mutated from E781, N967, and R1014 to yield a SaKKH Cas9 are underlined and in italics.

### High Fidelity Cas9 Domains

[0239] Some aspects of the disclosure provide high fidelity Cas9 domains. In some embodiments, high fidelity Cas9 domains are engineered Cas9 domains comprising one or more mutations that decrease electrostatic interactions between the Cas9 domain and the sugar-phosphate backbone of a DNA, relative to a corresponding wild-type Cas9 domain. High fidelity Cas9 domains that have decreased electrostatic interactions with the sugar-phosphate backbone of DNA can have less off-target effects. In some embodiments, the Cas9 domain (e.g., a wild type Cas9 domain) comprises one or more mutations that decrease the association between the Cas9 domain and the sugar-phosphate backbone of a DNA. In some embodiments, a Cas9 domain comprises one or more mutations that decreases the association between the Cas9 domain and the sugar-phosphate backbone of DNA by at least 1%, at least 2%, at least 3%, at least 4%, at least 5%, at least 10%, at least 15%, at least 20%, at least 25%, at least 30%, at least 35%, at least 40%, at least 45%, at least 50%, at least 55%, at least 60%, at least 65%, or at least 70%.

[0240] In some embodiments, any of the Cas9 fusion proteins provided herein comprise one or more of a N497X, a R661X, a Q695X, and/or a Q926X mutation, or a corresponding mutation in any of the amino acid sequences provided herein, wherein X is any amino acid. In some embodiments, any of the Cas9 fusion proteins provided herein comprise one or more of a N497A, a R661A, a Q695A, and/or a Q926A mutation, or a corresponding mutation in any of the amino acid sequences provided herein. In some embodiments, the Cas9 domain comprises a D10A mutation, or a corresponding mutation in any of the amino acid sequences provided herein. Cas9 domains with high fidelity are known in the art and would be apparent to the skilled artisan. For example, Cas9 domains with high fidelity have been described in Kleinstiver, B. P., et al. “High-fidelity CRISPR-Cas9 nucleases with no detectable genome-wide off-target effects.” Nature 529, 490-495 (2016); and Slaymaker, I. M., et al. “Rationally engineered Cas9 nucleases with improved specificity.” Science 351, 84-88 (2015); the entire contents of each are incorporated herein by reference.

[0241] In some embodiments, the modified Cas9 is a high fidelity Cas9 enzyme. In some embodiments, the high fidelity Cas9 enzyme is SpCas9(K855A), eSpCas9(1.1), SpCas9-HF1, or hyper accurate Cas9 variant (HypaCas9). The modified Cas9 eSpCas9(1.1) contains alanine substitutions that weaken the interactions between the HNH/RuvC groove and the non-target DNA strand, preventing strand separation and cutting at off-target sites. Similarly, SpCas9-HF1 lowers off-target editing through alanine substitutions that disrupt Cas9's interactions with the DNA phosphate backbone. HypaCas9 contains mutations (SpCas9 N692A/M694A/Q695A/H698A) in the REC3 domain that increase Cas9 proofreading and target discrimination. All three high fidelity enzymes generate less off-target editing than wildtype Cas9.

[0242] An exemplary high fidelity Cas9 is provided below.

### High Fidelity Cas9 Domain Mutations Relative to Cas9 are Shown in Bold and Underline

(SEQ ID NO: 78)
MDKKYSIGLAIGTNSVGWAVITDEYKVPSKKFKVL
GNTDRHSIKKNLIGALLFDSGETAEATRLKRTARR
RYTRRKNRICYLQEIFSNEMAKVDDSFFHRLEESF
LVEEDKKHERHPIFGNIVDEVAYHEKYPTIYHLRK
KLVDSTDKADLRLIYLALAHMIKFRGHFLIEGDLN
PDNSDVDKLFIQLVQTYNQLFEENPINASGVDAKA
ILSARLSKSRRLENLIAQLPGEKKNGLFGNLIALS
LGLTPNFKSNFDLAEDAKLQLSKDTYDDDLDNLLA
QIGDQYADLFLAAKNLSDAILLSDILRVNTEITKA
PLSASMIKRYDEHHQDLTLLKALVRQQLPEKYKEI
FFDQSKNGYAGYIDGGASQEEFYKFIKPILEKMDG
TEELLVKLNREDLLRKQRTFDNGSIPHQIHLGELH
AILRRQEDFYPFLKDNREKIEKILTFRIPYYVGPL
ARGNSRFAWMTRKSEETITPWNFEEVVDKGASAQS
FIERMTAFDKNLPNEKVLPKHSLLYEYFTVYNELT
KVKYVTEGMRKPAFLSGEQKKAIVDLLFKTNRKVT
VKQLKEDYFKKIECFDSVEISGVEDRFNASLGTYH
DLLKIIKDKDFLDNEENEDILEDIVLTLTLFEDRE
MIEERLKTYAHLFDDKVMKQLKRRRYTGWGALSRK
LINGIRDKQSGKTILDFLKSDGFANRNFMALIHDD
SLTFKEDIQKAQVSGQGDSLHEHIANLAGSPAIKK
GILQTVKVVDELVKVMGRHKPENIVIEMARENQTT
QKGQKNSRERMKRIEEGIKELGSQILKEHPVENTQ
LQNEKLYLYYLQNGRDMYVDQELDINRLSDYDVDH
IVPQSFLKDDSIDNKVLTRSDKNRGKSDNVPSEEV
VKKMKNYWRQLLNAKLITQRKFDNLTKAERGGLSE
LDKAGFIKRQLVETRAITKHVAQILDSRMNTKYDE
NDKLIREVKVITLKSKLVSDFRKDFQFYKVREINN
YHHAHDAYLNAVVGTALIKKYPKLESEFVYGDYKV
YDVRKMIAKSEQEIGKATAKYFFYSNIMNFFKTEI
TLANGEIRKRPLIETNGETGEIVWDKGRDFATVRK
VLSMPQVNIVKKTEVQTGGFSKESILPKRNSDKLI
ARKKDWDPKKYGGFDSPTVAYSVLVVAKVEKGKSK
KLKSVKELLGITIMERSSFEKNPIDFLEAKGYKEV
KKDLIIKLPKYSLFELENGRKRMLASAGELQKGNE
LALPSKYVNFLYLASHYEKLKGSPEDNEQKQLFVE
QHKHYLDEIIEQISEFSKRVILADANLDKVLSAYN
KHRDKPIREQAENIIHLFTLTNLGAPAAFKYFDTT
IDRKRYTSTKEVLDATLIHQSITGLYETRIDLSQL
GGD

### Guide Polynucleotides

[0244] As used herein, the term “guide polynucleotide(s)” refer to a polynucleotide which can be specific for a target sequence and can form a complex with a polynucleotide programmable nucleotide binding domain protein (e.g., Cas9 or Cpf1). In an embodiment, the guide polynucleotide is a guide RNA. As used herein, the term “guide RNA (gRNA)” and its grammatical equivalents can refer to an RNA which can be specific for a target DNA and can form a complex with Cas protein. An RNA/Cas complex can assist in “guiding” Cas protein to a target DNA. Cas9/crRNA/tracrRNA endonucleolytically cleaves linear or circular dsDNA target complementary to the spacer. The target strand not complementary to crRNA is first cut endonucleolytically, then trimmed 3′-5′ exonucleolytically. In nature, DNA-binding and cleavage typically requires protein and both RNAs. However, single guide RNAs (“sgRNA”, or simply “gNRA”) can be engineered so as to incorporate aspects of both the crRNA and tracrRNA into a single RNA species. See, e.g., Jinek M. et al., Science 337:816-821(2012), the entire contents of which is hereby incorporated by reference. Cas9 recognizes a short motif in the CRISPR repeat sequences (the PAM or protospacer adjacent motif) to help distinguish self versus non-self. Cas9 nuclease sequences and structures are well known to those of skill in the art (see e.g., “Complete genome sequence of an M1 strain of Streptococcus pyogenes.” Ferretti, J. J. et al., Natl. Acad. Sci. U.S.A. 98:4658-4663(2001); “CRISPR RNA maturation by trans-encoded small RNA and host factor RNase III.” Deltcheva E. et al., Nature 471:602-607(2011); and “Programmable dual-RNA-guided DNA endonuclease in adaptive bacterial immunity.” Jinek M. et al, Science 337:816-821(2012), the entire contents of each of which are incorporated herein by reference). Cas9 orthologs have been described in various species, including, but not limited to, S. pyogenes and S. thermophilus. Additional suitable Cas9 nucleases and sequences can be apparent to those of skill in the art based on this disclosure, and such Cas9 nucleases and sequences include Cas9 sequences from the organisms and loci disclosed in Chylinski, Rhun, and Charpentier, “The tracrRNA and Cas9 families of type II CRISPR-Cas immunity systems” (2013) RNA Biology 10:5, 726-737; the entire contents of which are incorporated herein by reference. In some embodiments, a Cas9 nuclease has an inactive (e.g., an inactivated) DNA cleavage domain, that is, the Cas9 is a nickase.

[0245] In some embodiments, the guide polynucleotide is at least one single guide RNA (“sgRNA” or “gNRA”). In some embodiments, the guide polynucleotide is at least one tracrRNA. In some embodiments, the guide polynucleotide does not require PAM sequence to guide the polynucleotide-programmable DNA-binding domain (e.g., Cas9 or Cpf1) to the target nucleotide sequence.

[0246] The polynucleotide programmable nucleotide binding domain (e.g., a CRISPR-derived domain) of the base editors disclosed herein can recognize a target polynucleotide sequence by associating with a guide polynucleotide. A guide polynucleotide (e.g., gRNA) is typically single-stranded and can be programmed to site-specifically bind (i.e., via complementary base pairing) to a target sequence of a polynucleotide, thereby directing a base editor that is in conjunction with the guide nucleic acid to the target sequence. A guide polynucleotide can be DNA. A guide polynucleotide can be RNA. In some cases, the guide polynucleotide comprises natural nucleotides (e.g., adenosine). In some cases, the guide polynucleotide comprises non-natural (or unnatural) nucleotides (e.g., peptide nucleic acid or nucleotide analogs). In some cases, the targeting region of a guide nucleic acid sequence can be at least 15, 16, 17, 18, 19, 20, 21, 22, 23, 24, 25, 26, 27, 28, 29, or 30 nucleotides in length. A targeting region of a guide nucleic acid can be between 10-30 nucleotides in length, or between 15-25 nucleotides in length, or between 15-20 nucleotides in length.

[0247] In some embodiments, a guide polynucleotide comprises two or more individual polynucleotides, which can interact with one another via for example complementary base pairing (e.g. a dual guide polynucleotide). For example, a guide polynucleotide can comprise a CRISPR RNA (crRNA) and a trans-activating CRISPR RNA (tracrRNA). For example, a guide polynucleotide can comprise one or more trans-activating CRISPR RNA (tracrRNA).

[0248] In type II CRISPR systems, targeting of a nucleic acid by a CRISPR protein (e.g. Cas9) typically requires complementary base pairing between a first RNA molecule (crRNA) comprising a sequence that recognizes the target sequence and a second RNA molecule (trRNA) comprising repeat sequences which forms a scaffold region that stabilizes the guide RNA-CRISPR protein complex. Such dual guide RNA systems can be employed as a guide polynucleotide to direct the base editors disclosed herein to a target polynucleotide sequence.

[0249] In some embodiments, the base editor provided herein utilizes a single guide polynucleotide (e.g., gRNA). In some embodiments, the base editor provided herein utilizes a dual guide polynucleotide (e.g., dual gRNAs). In some embodiments, the base editor provided herein utilizes one or more guide polynucleotide (e.g., multiple gRNA). In some embodiments, a single guide polynucleotide is utilized for different base editors described herein. For example, a single guide polynucleotide can be utilized for a cytidine base editor and an adenosine base editor.

[0250] In other embodiments, a guide polynucleotide can comprise both the polynucleotide targeting portion of the nucleic acid and the scaffold portion of the nucleic acid in a single molecule (i.e., a single-molecule guide nucleic acid). For example, a single-molecule guide polynucleotide can be a single guide RNA (sgRNA or gRNA). Herein the term guide polynucleotide sequence contemplates any single, dual or multi-molecule nucleic acid capable of interacting with and directing a base editor to a target polynucleotide sequence.

[0251] Typically, a guide polynucleotide (e.g., crRNA/trRNA complex or a gRNA) comprises a “polynucleotide-targeting segment” that includes a sequence capable of recognizing and binding to a target polynucleotide sequence, and a “protein-binding segment” that stabilizes the guide polynucleotide within a polynucleotide programmable nucleotide binding domain component of a base editor. In some embodiments, the polynucleotide targeting segment of the guide polynucleotide recognizes and binds to a DNA polynucleotide, thereby facilitating the editing of a base in DNA. In other cases, the polynucleotide targeting segment of the guide polynucleotide recognizes and binds to an RNA polynucleotide, thereby facilitating the editing of a base in RNA. Herein a “segment” refers to a section or region of a molecule, e.g., a contiguous stretch of nucleotides in the guide polynucleotide. A segment can also refer to a region/section of a complex such that a segment can comprise regions of more than one molecule. For example, where a guide polynucleotide comprises multiple nucleic acid molecules, the protein-binding segment of can include all or a portion of multiple separate molecules that are for instance hybridized along a region of complementarily. In some embodiments, a protein-binding segment of a DNA-targeting RNA that comprises two separate molecules can comprise (i) base pairs 40-75 of a first RNA molecule that is 100 base pairs in length; and (ii) base pairs 10-25 of a second RNA molecule that is 50 base pairs in length. The definition of “segment,” unless otherwise specifically defined in a particular context, is not limited to a specific number of total base pairs, is not limited to any particular number of base pairs from a given RNA molecule, is not limited to a particular number of separate molecules within a complex, and can include regions of RNA molecules that are of any total length and can include regions with complementarity to other molecules.

[0252] A guide RNA or a guide polynucleotide can comprise two or more RNAs, e.g., CRISPR RNA (crRNA) and transactivating crRNA (tracrRNA). A guide RNA or a guide polynucleotide can sometimes comprise a single-chain RNA, or single guide RNA (sgRNA) formed by fusion of a portion (e.g., a functional portion) of crRNA and tracrRNA. A guide RNA or a guide polynucleotide can also be a dual RNA comprising a crRNA and a tracrRNA. Furthermore, a crRNA can hybridize with a target DNA.

[0253] As discussed above, a guide RNA or a guide polynucleotide can be an expression product. For example, a DNA that encodes a guide RNA can be a vector comprising a sequence coding for the guide RNA. A guide RNA or a guide polynucleotide can be transferred into a cell by transfecting the cell with an isolated guide RNA or plasmid DNA comprising a sequence coding for the guide RNA and a promoter. A guide RNA or a guide polynucleotide can also be transferred into a cell in other way, such as using virus-mediated gene delivery.

[0254] A guide RNA or a guide polynucleotide can be isolated. For example, a guide RNA can be transfected in the form of an isolated RNA into a cell or organism. A guide RNA can be prepared by in vitro transcription using any in vitro transcription system known in the art. A guide RNA can be transferred to a cell in the form of isolated RNA rather than in the form of plasmid comprising encoding sequence for a guide RNA.

[0255] A guide RNA or a guide polynucleotide can comprise three regions: a first region at the 5′ end that can be complementary to a target site in a chromosomal sequence, a second internal region that can form a stem loop structure, and a third 3′ region that can be single-stranded. A first region of each guide RNA can also be different such that each guide RNA guides a fusion protein to a specific target site. Further, second and third regions of each guide RNA can be identical in all guide RNAs.

[0256] A first region of a guide RNA or a guide polynucleotide can be complementary to sequence at a target site in a chromosomal sequence such that the first region of the guide RNA can base pair with the target site. In some cases, a first region of a guide RNA can comprise from or from about 10 nucleotides to 25 nucleotides (i.e., from 10 nucleotides to nucleotides; or from about 10 nucleotides to about 25 nucleotides; or from 10 nucleotides to about 25 nucleotides; or from about 10 nucleotides to 25 nucleotides) or more. For example, a region of base pairing between a first region of a guide RNA and a target site in a chromosomal sequence can be or can be about 10, 11, 12, 13, 14, 15, 16, 17, 18, 19, 20, 22, 23, 24, 25, or more nucleotides in length. Sometimes, a first region of a guide RNA can be or can be about 19, 20, or 21 nucleotides in length.

[0257] A guide RNA or a guide polynucleotide can also comprise a second region that forms a secondary structure. For example, a secondary structure formed by a guide RNA can comprise a stem (or hairpin) and a loop. A length of a loop and a stem can vary. For example, a loop can range from or from about 3 to 10 nucleotides in length, and a stem can range from or from about 6 to 20 base pairs in length. A stem can comprise one or more bulges of 1 to 10 or about 10 nucleotides. The overall length of a second region can range from or from about 16 to 60 nucleotides in length. For example, a loop can be or can be about 4 nucleotides in length and a stem can be or can be about 12 base pairs.

[0258] A guide RNA or a guide polynucleotide can also comprise a third region at the 3′ end that can be essentially single-stranded. For example, a third region is sometimes not complementarity to any chromosomal sequence in a cell of interest and is sometimes not complementarity to the rest of a guide RNA. Further, the length of a third region can vary. A third region can be more than or more than about 4 nucleotides in length. For example, the length of a third region can range from or from about 5 to 60 nucleotides in length.

[0259] A guide RNA or a guide polynucleotide can target any exon or intron of a gene target. In some cases, a guide can target exon 1 or 2 of a gene, in other cases; a guide can target exon 3 or 4 of a gene. A composition can comprise multiple guide RNAs that all target the same exon or in some cases, multiple guide RNAs that can target different exons. An exon and an intron of a gene can be targeted.

[0260] A guide RNA or a guide polynucleotide can target a nucleic acid sequence of or of about 20 nucleotides. A target nucleic acid can be less than or less than about 20 nucleotides. A target nucleic acid can be at least or at least about 5, 10, 15, 16, 17, 18, 19, 20, 21, 22, 23, 24, 25, 30, or anywhere between 1-100 nucleotides in length. A target nucleic acid can be at most or at most about 5, 10, 15, 16, 17, 18, 19, 20, 21, 22, 23, 24, 25, 30, 40, 50, or anywhere between 1-100 nucleotides in length. A target nucleic acid sequence can be or can be about 20 bases immediately 5′ of the first nucleotide of the PAM. A guide RNA can target a nucleic acid sequence. A target nucleic acid can be at least or at least about 1-10, 1-20, 1-30, 1-40, 1-50, 1-60, 1-70, 1-80, 1-90, or 1-100 nucleotides.

[0261] A guide polynucleotide, for example, a guide RNA, can refer to a nucleic acid that can hybridize to another nucleic acid, for example, the target nucleic acid or protospacer in a genome of a cell. A guide polynucleotide can be RNA. A guide polynucleotide can be DNA. The guide polynucleotide can be programmed or designed to bind to a sequence of nucleic acid site-specifically. A guide polynucleotide can comprise a polynucleotide chain and can be called a single guide polynucleotide. A guide polynucleotide can comprise two polynucleotide chains and can be called a double guide polynucleotide. A guide RNA can be introduced into a cell or embryo as an RNA molecule. For example, a RNA molecule can be transcribed in vitro and/or can be chemically synthesized. An RNA can be transcribed from a synthetic DNA molecule, e.g., a gBlocks® gene fragment. A guide RNA can then be introduced into a cell or embryo as an RNA molecule. A guide RNA can also be introduced into a cell or embryo in the form of a non-RNA nucleic acid molecule, e.g., DNA molecule. For example, a DNA encoding a guide RNA can be operably linked to promoter control sequence for expression of the guide RNA in a cell or embryo of interest. A RNA coding sequence can be operably linked to a promoter sequence that is recognized by RNA polymerase III (Pol III). Plasmid vectors that can be used to express guide RNA include, but are not limited to, px330 vectors and px333 vectors. In some cases, a plasmid vector (e.g., px333 vector) can comprise at least two guide RNA-encoding DNA sequences.

[0262] Methods for selecting, designing, and validating guide polynucleotides, e.g. guide RNAs and targeting sequences are described herein and known to those skilled in the art. For example, to minimize the impact of potential substrate promiscuity of a deaminase domain in the nucleobase editor system (e.g., an AID domain), the number of residues that could unintentionally be targeted for deamination (e.g., off-target C residues that could potentially reside on ssDNA within the target nucleic acid locus) may be minimized. In addition, software tools can be used to optimize the gRNAs corresponding to a target nucleic acid sequence, e.g., to minimize total off-target activity across the genome. For example, for each possible targeting domain choice using S. pyogenes Cas9, all off-target sequences (preceding selected PAMs, e.g. NAG or NGG) may be identified across the genome that contain up to certain number (e.g., 1, 2, 3, 4, 5, 6, 7, 8, 9, or 10) of mismatched base-pairs. First regions of gRNAs complementary to a target site can be identified, and all first regions (e.g. crRNAs) can be ranked according to its total predicted off-target score; the top-ranked targeting domains represent those that are likely to have the greatest on-target and the least off-target activity. Candidate targeting gRNAs can be functionally evaluated by using methods known in the art and/or as set forth herein.

[0263] As a non-limiting example, target DNA hybridizing sequences in crRNAs of a guide RNA for use with Cas9s may be identified using a DNA sequence searching algorithm. gRNA design may be carried out using custom gRNA design software based on the public tool cas-offinder as described in Bae S., Park J., & Kim J.-S. Cas-OFFinder: A fast and versatile algorithm that searches for potential off-target sites of Cas9 RNA-guided endonucleases. Bioinformatics 30, 1473-1475 (2014). This software scores guides after calculating their genome-wide off-target propensity. Typically matches ranging from perfect matches to 7 mismatches are considered for guides ranging in length from 17 to 24. Once the off-target sites are computationally-determined, an aggregate score is calculated for each guide and summarized in a tabular output using a web-interface. In addition to identifying potential target sites adjacent to PAM sequences, the software also identifies all PAM adjacent sequences that differ by 1, 2, 3 or more than 3 nucleotides from the selected target sites. Genomic DNA sequences for a target nucleic acid sequence, e.g. a target gene may be obtained and repeat elements may be screened using publically available tools, for example, the RepeatMasker program. RepeatMasker searches input DNA sequences for repeated elements and regions of low complexity. The output is a detailed annotation of the repeats present in a given query sequence.

[0264] Following identification, first regions of guide RNAs, e.g. crRNAs, may be ranked into tiers based on their distance to the target site, their orthogonality and presence of 5′ nucleotides for close matches with relevant PAM sequences (for example, a 5′ G based on identification of close matches in the human genome containing a relevant PAM e.g., NGG PAM for S. pyogenes, NNGRRT or NNGRRV PAM for S. aureus). As used herein, orthogonality refers to the number of sequences in the human genome that contain a minimum number of mismatches to the target sequence. A “high level of orthogonality” or “good orthogonality” may, for example, refer to 20-mer targeting domains that have no identical sequences in the human genome besides the intended target, nor any sequences that contain one or two mismatches in the target sequence. Targeting domains with good orthogonality may be selected to minimize off-target DNA cleavage.

[0265] In some embodiments, a reporter system may be used for detecting base-editing activity and testing candidate guide polynucleotides. In some embodiments, a reporter system may comprise a reporter gene based assay where base editing activity leads to expression of the reporter gene. For example, a reporter system may include a reporter gene comprising a deactivated start codon, e.g., a mutation on the template strand from 3′-TAC-5′ to 3′-CAC-5′. Upon successful deamination of the target C, the corresponding mRNA will be transcribed as 5′-AUG-3′ instead of 5′-GUG-3′, enabling the translation of the reporter gene. Suitable reporter genes will be apparent to those of skill in the art. Non-limiting examples of reporter genes include gene encoding green fluorescence protein (GFP), red fluorescence protein (RFP), luciferase, secreted alkaline phosphatase (SEAP), or any other gene whose expression are detectable and apparent to those skilled in the art. The reporter system can be used to test many different gRNAs, e.g., in order to determine which residue(s) with respect to the target DNA sequence the respective deaminase will target. sgRNAs that target non-template strand can also be tested in order to assess off-target effects of a specific base editing protein, e.g. a Cas9 deaminase fusion protein. In some embodiments, such gRNAs can be designed such that the mutated start codon will not be base-paired with the gRNA. The guide polynucleotides can comprise standard ribonucleotides, modified ribonucleotides (e.g., pseudouridine), ribonucleotide isomers, and/or ribonucleotide analogs. In some embodiments, the guide polynucleotide can comprise at least one detectable label. The detectable label can be a fluorophore (e.g., FAM, TMR, Cy3, Cy5, Texas Red, Oregon Green, Alexa Fluors, Halo tags, or suitable fluorescent dye), a detection tag (e.g., biotin, digoxigenin, and the like), quantum dots, or gold particles.

[0266] The guide polynucleotides can be synthesized chemically, synthesized enzymatically, or a combination thereof. For example, the guide RNA can be synthesized using standard phosphoramidite-based solid-phase synthesis methods. Alternatively, the guide RNA can be synthesized in vitro by operably linking DNA encoding the guide RNA to a promoter control sequence that is recognized by a phage RNA polymerase. Examples of suitable phage promoter sequences include T7, T3, SP6 promoter sequences, or variations thereof. In embodiments in which the guide RNA comprises two separate molecules (e.g., crRNA and tracrRNA), the crRNA can be chemically synthesized and the tracrRNA can be enzymatically synthesized.

[0267] In some embodiments, a base editor system may comprise multiple guide polynucleotides, e.g. gRNAs. For example, the gRNAs may target to one or more target loci (e.g., at least 1 gRNA, at least 2 gRNA, at least 5 gRNA, at least 10 gRNA, at least 20 gRNA, at least 30 g RNA, at least 50 gRNA) comprised in a base editor system. Said multiple gRNA sequences can be tandemly arranged and are preferably separated by a direct repeat.

[0268] A DNA sequence encoding a guide RNA or a guide polynucleotide can also be part of a vector. Further, a vector can comprise additional expression control sequences (e.g., enhancer sequences, Kozak sequences, polyadenylation sequences, transcriptional termination sequences, etc.), selectable marker sequences (e.g., GFP or antibiotic resistance genes such as puromycin), origins of replication, and the like. A DNA molecule encoding a guide RNA can also be linear. A DNA molecule encoding a guide RNA or a guide polynucleotide can also be circular.

[0269] In some embodiments, one or more components of a base editor system may be encoded by DNA sequences. Such DNA sequences may be introduced into an expression system, e.g. a cell, together or separately. For example, DNA sequences encoding a polynucleotide programmable nucleotide binding domain and a guide RNA may be introduced into a cell, each DNA sequence can be part of a separate molecule (e.g., one vector containing the polynucleotide programmable nucleotide binding domain coding sequence and a second vector containing the guide RNA coding sequence) or both can be part of a same molecule (e.g., one vector containing coding (and regulatory) sequence for both the polynucleotide programmable nucleotide binding domain and the guide RNA).

[0270] A guide polynucleotide can comprise one or more modifications to provide a nucleic acid with a new or enhanced feature. A guide polynucleotide can comprise a nucleic acid affinity tag. A guide polynucleotide can comprise synthetic nucleotide, synthetic nucleotide analog, nucleotide derivatives, and/or modified nucleotides.

[0271] In some cases, a gRNA or a guide polynucleotide can comprise modifications. A modification can be made at any location of a gRNA or a guide polynucleotide. More than one modification can be made to a single gRNA or a guide polynucleotide. A gRNA or a guide polynucleotide can undergo quality control after a modification. In some cases, quality control can include PAGE, HPLC, MS, or any combination thereof.

[0272] A modification of a gRNA or a guide polynucleotide can be a substitution, insertion, deletion, chemical modification, physical modification, stabilization, purification, or any combination thereof.

[0273] A gRNA or a guide polynucleotide can also be modified by 5′adenylate, 5′ guanosine-triphosphate cap, 5′N7-Methylguanosine-triphosphate cap, 5′triphosphate cap, 3′phosphate, 3′thiophosphate, 5′phosphate, 5′thiophosphate, Cis-Syn thymidine dimer, trimers, C12 spacer, C3 spacer, C6 spacer, dSpacer, PC spacer, rSpacer, Spacer 18, Spacer 9,3′-3′ modifications, 5′-5′ modifications, abasic, acridine, azobenzene, biotin, biotin BB, biotin TEG, cholesteryl TEG, desthiobiotin TEG, DNP TEG, DNP-X, DOTA, dT-Biotin, dual biotin, PC biotin, psoralen C2, psoralen C6, TINA, 3′DABCYL, black hole quencher 1, black hole quencer 2, DABCYL SE, dT-DABCYL, IRDye QC-1, QSY-21, QSY-35, QSY-7, QSY-9, carboxyl linker, thiol linkers, 2′-deoxyribonucleoside analog purine, 2′-deoxyribonucleoside analog pyrimidine, ribonucleoside analog, 2′-O-methyl ribonucleoside analog, sugar modified analogs, wobble/universal bases, fluorescent dye label, 2′-fluoro RNA, 2′-O-methyl RNA, methylphosphonate, phosphodiester DNA, phosphodiester RNA, phosphothioate DNA, phosphorothioate RNA, UNA, pseudouridine-5′-triphosphate, 5′-methylcytidine-5′-triphosphate, or any combination thereof.

[0274] In some cases, a modification is permanent. In other cases, a modification is transient. In some cases, multiple modifications are made to a gRNA or a guide polynucleotide. A gRNA or a guide polynucleotide modification can alter physiochemical properties of a nucleotide, such as their conformation, polarity, hydrophobicity, chemical reactivity, base-pairing interactions, or any combination thereof.

[0275] A modification can also be a phosphorothioate substitute. In some cases, a natural phosphodiester bond can be susceptible to rapid degradation by cellular nucleases and; a modification of internucleotide linkage using phosphorothioate (PS) bond substitutes can be more stable towards hydrolysis by cellular degradation. A modification can increase stability in a gRNA or a guide polynucleotide. A modification can also enhance biological activity. In some cases, a phosphorothioate enhanced RNA gRNA can inhibit RNase A, RNase T1, calf serum nucleases, or any combinations thereof. These properties can allow the use of PS-RNA gRNAs to be used in applications where exposure to nucleases is of high probability in vivo or in vitro. For example, phosphorothioate (PS) bonds can be introduced between the last 3-5 nucleotides at the 5′- or “-end of a gRNA which can inhibit exonuclease degradation. In some cases, phosphorothioate bonds can be added throughout an entire gRNA to reduce attack by endonucleases.

### Protospacer Adjacent Motif

[0276] The term “protospacer adjacent motif (PAM)” or PAM-like motif refers to a 2-6 base pair DNA sequence immediately following the DNA sequence targeted by the Cas9 nuclease in the CRISPR bacterial adaptive immune system. In some embodiments, the PAM can be a 5′ PAM (i.e., located upstream of the 5′ end of the protospacer). In other embodiments, the PAM can be a 3′ PAM (i.e., located downstream of the 5′ end of the protospacer).

[0277] The protospacer adjacent motif (PAM) or PAM-like motif refers to a 2-6 base pair DNA sequence immediately following the DNA sequence targeted by the Cas9 nuclease in the CRISPR bacterial adaptive immune system. In some embodiments, the PAM can be a 5′ PAM (i.e., located upstream of the 5′ end of the protospacer). In other embodiments, the PAM can be a 3′ PAM (i.e., located downstream of the 5′ end of the protospacer). The PAM sequence is essential for target binding, but the exact sequence depends on a type of Cas protein.

[0278] A base editor provided herein can comprise a CRISPR protein-derived domain that is capable of binding a nucleotide sequence that contains a canonical or non-canonical protospacer adjacent motif (PAM) sequence. A PAM site is a nucleotide sequence in proximity to a target polynucleotide sequence. Some aspects of the disclosure provide for base editors comprising all or a portion of CRISPR proteins that have different PAM specificities. For example, typically Cas9 proteins, such as Cas9 from S. pyogenes (spCas9), require a canonical NGG PAM sequence to bind a particular nucleic acid region, where the “N” in “NGG” is adenine (A), thymine (T), guanine (G), or cytosine (C), and the G is guanine. A PAM can be CRISPR protein-specific and can be different between different base editors comprising different CRISPR protein-derived domains. A PAM can be 5′ or 3′ of a target sequence. A PAM can be upstream or downstream of a target sequence. A PAM can be 1, 2, 3, 4, 5, 6, 7, 8, 9, 10 or more nucleotides in length. Often, a PAM is between 2-6 nucleotides in length.

[0279] In some embodiments, the Cas9 domain is a Cas9 domain from Streptococcus pyogenes (SpCas9). In some embodiments, the SpCas9 domain is a nuclease active SpCas9, a nuclease inactive SpCas9 (SpCas9d), or a SpCas9 nickase (SpCas9n). In some embodiments, the SpCas9 comprises a D9X mutation, or a corresponding mutation in any of the amino acid sequences provided herein, wherein X is any amino acid except for D. In some embodiments, the SpCas9 comprises a D9A mutation, or a corresponding mutation in any of the amino acid sequences provided herein. In some embodiments, the SpCas9 domain, the SpCas9d domain, or the SpCas9n domain can bind to a nucleic acid sequence having a non-canonical PAM. In some embodiments, the SpCas9 domain, the SpCas9d domain, or the SpCas9n domain can bind to a nucleic acid sequence having an NGG, a NGA, or a NGCG PAM sequence. In some embodiments, the SpCas9 domain comprises one or more of a D1135X, a R1335X, and a T1336X mutation, or a corresponding mutation in any of the amino acid sequences provided herein, wherein X is any amino acid. In some embodiments, the SpCas9 domain comprises one or more of a D1135E, R1335Q, and T1336R mutation, or a corresponding mutation in any of the amino acid sequences provided herein. In some embodiments, the SpCas9 domain comprises a D1135E, a R1335Q, and a T1336R mutation, or corresponding mutations in any of the amino acid sequences provided herein. In some embodiments, the SpCas9 domain comprises one or more of a D1135X, a R1335X, and a T1336X mutation, or a corresponding mutation in any of the amino acid sequences provided herein, wherein X is any amino acid. In some embodiments, the SpCas9 domain comprises one or more of a D1135V, a R1335Q, and a T1336R mutation, or a corresponding mutation in any of the amino acid sequences provided herein. In some embodiments, the SpCas9 domain comprises a D1135V, a R1335Q, and a T1336R mutation, or corresponding mutations in any of the amino acid sequences provided herein. In some embodiments, the SpCas9 domain comprises one or more of a D1135X, a G1217X, a R1335X, and a T1336X mutation, or a corresponding mutation in any of the amino acid sequences provided herein, wherein X is any amino acid. In some embodiments, the SpCas9 domain comprises one or more of a D1135V, a G1217R, a R1335Q, and a T1336R mutation, or a corresponding mutation in any of the amino acid sequences provided herein. In some embodiments, the SpCas9 domain comprises a D1135V, a G1217R, a R1335Q, and a T1336R mutation, or corresponding mutations in any of the amino acid sequences provided herein.

[0280] In some embodiments, the Cas9 domains of any of the fusion proteins provided herein comprises an amino acid sequence that is at least 60%, at least 65%, at least 70%, at least 75%, at least 80%, at least 85%, at least 90%, at least 95%, at least 96%, at least 97%, at least 98%, at least 99%, or at least 99.5% identical to a Cas9 polypeptide described herein. In some embodiments, the Cas9 domains of any of the fusion proteins provided herein comprises the amino acid sequence of any Cas9 polypeptide described herein. In some embodiments, the Cas9 domains of any of the fusion proteins provided herein consists of the amino acid sequence of any Cas9 polypeptide described herein.

[0281] The amino acid sequence of an exemplary PAM-binding SpCas9 is as follows:

(SEQ ID NO: 79)
MDKKYSIGLDIGTNSVGWAVITDEYKVPSKKFKVL
GNTDRHSIKKNLIGALLFDSGETAEATRLKRTARR
RYTRRKNRICYLQEIFSNEMAKVDDSFFHRLEESF
LVEEDKKHERHPIFGNIVDEVAYHEKYPTIYHLRK
KLVDSTDKADLRLIYLALAHMIKFRGHFLIEGDLN
PDNSDVDKLFIQLVQTYNQLFEENPINASGVDAKA
ILSARLSKSRRLENLIAQLPGEKKNGLFGNLIALS
LGLTPNFKSNFDLAEDAKLQLSKDTYDDDLDNLLA
QIGDQYADLFLAAKNLSDAILLSDILRVNTEITKA
PLSASMIKRYDEHHQDLTLLKALVRQQLPEKYKEI
FFDQSKNGYAGYIDGGASQEEFYKFIKPILEKMDG
TEELLVKLNREDLLRKQRTFDNGSIPHQIHLGELH
AILRRQEDFYPFLKDNREKIEKILTFRIPYYVGPL
ARGNSRFAWMTRKSEETITPWNFEEVVDKGASAQS
FIERMTNFDKNLPNEKVLPKHSLLYEYFTVYNELT
KVKYVTEGMRKPAFLSGEQKKAIVDLLFKTNRKVT
VKQLKEDYFKKIECFDSVEISGVEDRFNASLGTYH
DLLKIIKDKDFLDNEENEDILEDIVLTLTLFEDRE
MIEERLKTYAHLFDDKVMKQLKRRRYTGWGRLSRK
LINGIRDKQSGKTILDFLKSDGFANRNFMQLIHDD
SLTFKEDIQKAQVSGQGDSLHEHIANLAGSPAIKK
GILQTVKVVDELVKVMGRHKPENIVIEMARENQTT
QKGQKNSRERMKRIEEGIKELGSQILKEHPVENTQ
LQNEKLYLYYLQNGRDMYVDQELDINRLSDYDVDH
IVPQSFLKDDSIDNKVLTRSDKNRGKSDNVPSEEV
VKKMKNYWRQLLNAKLITQRKFDNLTKAERGGLSE
LDKAGFIKRQLVETRQITKHVAQILDSRMNTKYDE
NDKLIREVKVITLKSKLVSDFRKDFQFYKVREINN
YHHAHDAYLNAVVGTALIKKYPKLESEFVYGDYKV
YDVRKMIAKSEQEIGKATAKYFFYSNIMNFFKTEI
TLANGEIRKRPLIETNGETGEIVWDKGRDFATVRK
VLSMPQVNIVKKTEVQTGGFSKESILPKRNSDKLI
ARKKDWDPKKYGGFDSPTVAYSVLVVAKVEKGKSK
KLKSVKELLGITIMERSSFEKNPIDFLEAKGYKEV
KKDLIIKLPKYSLFELENGRKRMLASAGELQKGNE
LALPSKYVNFLYLASHYEKLKGSPEDNEQKQLFVE
QHKHYLDEIIEQISEFSKRVILADANLDKVLSAYN
KHRDKPIREQAENIIHLFTLTNLGAPAAFKYFDTT
IDRKRYTSTKEVLDATLIHQSITGLYETRIDLSQL
GGD.

[0282] The amino acid sequence of an exemplary PAM-binding SpCas9n is as follows:

(SEQ ID NO: 80)
MDKKYSIGLAIGTNSVGWAVITDEYKVPSKKFKVLGNTDRHSIKKNLIGA
LLFDSGETAEATRLKRTARRRYTRRKNRICYLQEIFSNEMAKVDDSFFHR
LEESFLVEEDKKHERHPIFGNIVDEVAYHEKYPTIYHLRKKLVDSTDKAD
LRLIYLALAHMIKFRGHFLIEGDLNPDNSDVDKLFIQLVQTYNQLFEENP
INASGVDAKAILSARLSKSRRLENLIAQLPGEKKNGLFGNLIALSLGLTP
NFKSNFDLAEDAKLQLSKDTYDDDLDNLLAQIGDQYADLFLAAKNLSDAI
LLSDILRVNTEITKAPLSASMIKRYDEHHQDLTLLKALVRQQLPEKYKEI
FFDQSKNGYAGYIDGGASQEEFYKFIKPILEKMDGTEELLVKLNREDLLR
KQRTFDNGSIPHQIHLGELHAILRRQEDFYPFLKDNREKIEKILTFRIPY
YVGPLARGNSRFAWMTRKSEETITPWNFEEVVDKGASAQSFIERMTNFDK
NLPNEKVLPKHSLLYEYFTVYNELTKVKYVTEGMRKPAFLSGEQKKAIVD
LLFKTNRKVTVKQLKEDYFKKIECFDSVEISGVEDRFNASLGTYHDLLKI
IKDKDFLDNEENEDILEDIVLTLTLFEDREMIEERLKTYAHLFDDKVMKQ
LKRRRYTGWGRLSRKLINGIRDKQSGKTILDFLKSDGFANRNFMQLIHDD
SLTFKEDIQKAQVSGQGDSLHEHIANLAGSPAIKKGILQTVKVVDELVKV
MGRHKPENIVIEMARENQTTQKGQKNSRERMKRIEEGIKELGSQILKEHP
VENTQLQNEKLYLYYLQNGRDMYVDQELDINRLSDYDVDHIVPQSFLKDD
SIDNKVLTRSDKNRGKSDNVPSEEVVKKMKNYWRQLLNAKLITQRKFDNL
TKAERGGLSELDKAGFIKRQLVETRQITKHVAQILDSRMNTKYDENDKLI
REVKVITLKSKLVSDFRKDFQFYKVREINNYHHAHDAYLNAVVGTALIKK
YPKLESEFVYGDYKVYDVRKMIAKSEQEIGKATAKYFFYSNIMNFFKTEI
TLANGEIRKRPLIETNGETGEIVWDKGRDFATVRKVLSMPQVNIVKKTEV
QTGGFSKESILPKRNSDKLIARKKDWDPKKYGGFDSPTVAYSVLVVAKVE
KGKSKKLKSVKELLGITIMERSSFEKNPIDFLEAKGYKEVKKDLIIKLPK
YSLFELENGRKRMLASAGELQKGNELALPSKYVNFLYLASHYEKLKGSPE
DNEQKQLFVEQHKHYLDEIIEQISEFSKRVILADANLDKVLSAYNKHRDK
PIREQAENIIHLFTLTNLGAPAAFKYFDTTIDRKRYTSTKEVLDATLIHQ
SITGLYETRIDLSQLGGD.

[0283] The amino acid sequence of an exemplary PAM-binding SpEQR Cas9 is as follows:

MDKKYSIGLAIGTNSVGWAVITDEYKVPSKKFKVLGNTDRHSIKKNLIGALLFDSGETA EATRLKRTARRRYTRRKNRICYLQEIFSNEMAKVDDSFFHRLEESFVEEDKKHERHPIFG NIVDEVAYHEKYPTIYHLRKKLVDSTDKADLRLIYLALAHMIKFRGHFLIEGDLNPDNS DVDKLFIQLVQTYNQLFEENPINASGVDAKAILSARLSKSRRLENLIAQLPGEKKNGLFG NLIALSLGLTPNFKSNFDLAEDAKLQLSKDTYDDDLDNLLAQIGDQYADLFLAAKNLSD AILLSDILRVNTEITKAPLSASMIKRYDEHHQDLTLLKALVRQQLPEKYKEIFFDQSKNG YAGYIDGGASQEEFYKFIKPILEKMDGTEELLVKLNREDLLRKQRTFDNGSIPHQIHLGE LHAILRRQEDFYPFLKDNREKIEKILTFRIPYYVGPLARGNSRFAWMTRKSEETITPWNF EEVVDKGASAQSFIERMTNFDKNLPNEKVLPKHSLLYEYFTVYNELTKVKYVTEGMRK PAFLSGEQKKAIVDLLFKTNRKVTVKQLKEDYFKKIECFDSVEISGVEDRFNASLGTYH DLLKIIKDKDFLDNEENEDILEDIVLTLTLFEDREMIEERLKTYAHLFDDKVMKQLKRRR YTGWGRLSRKLINGIRDKQSGKTILDFLKSDGFANRNFMQLIHDDSLTFKEDIQKAQVS GQGDSLHEHIANLAGSPAIKKGILQTVKVVDELVKVMGRHKPENIVIEMARENQTTQK GQKNSRERMKRIEEGIKELGSQILKEHPVENTQLQNEKLYLYYLQNGRDMYVDQELDI NRLSDYDVDHIVPQSFLKDDSIDNKVLTRSDKNRGKSDNVPSEEVVKKMKNYWRQLL NAKLITQRKFDNLTKAERGGLSELDKAGFIKRQLVETRQITKHVAQILDSRMNTKYDEN DKLIREVKVITLKSKLVSDFRKDFQFYKVREINNYHHAHDAYLNAVVGTALIKKYPKLE SEFVYGDYKVYDVRKMIAKSEQEIGKATAKYFFYSNIMNFFKTEITLANGEIRKRPLIET NGETGEIVWDKGRDFATVRKVLSMPQVNIVKKTEVQTGGFSKESILPKRNSDKLIARKK DWDPKKYGGFESPTVAYSVLVVAKVEKGKSKKLKSVKELLGITIMERSSFEKNPIDFLE AKGYKEVKKDLIIKLPKYSLFELENGRKRMLASAGELQKGNELALPSKYVNFLYLASH YEKLKGSPEDNEQKQLFVEQHKHYLDEIIEQISEFSKRVILADANLDKVLSAYNKHRDK PIREQAENIIHLFTLTNLGAPAAFKYFDTTIDRKQYRSTKEVLDATLIHQSITGLYETRIDL SQLGGD (SEQ ID NO: 81). In this sequence, residues E1135, Q1335 and R1337, which can be mutated from D1135, R1335, and T1337 to yield a SpEQR Cas9, are underlined and in bold.

[0284] The amino acid sequence of an exemplary PAM-binding SpVQR Cas9 is as follows:

[0285] MDKKYSIGLAIGTNSVGWAVITDEYKVPSKKFKVLGNTDRHSIKKNLIGALLFDSGETA EATRLKRTARRRYTRRKNRICYLQEIFSNEMAKVDDSFFHRLEESFLVEEDKKHERHPIF GNIVDEVAYHEKYPTIYHLRKKLVDSTDKADLRLIYLALAHMIKFRGHFLIEGDLNPDN SDVDKLFIQLVQTYNQLFEENPINASGVDAKAILSARLSKSRRLENLIAQLPGEKKNGLF GNLIALSLGLTPNFKSNFDLAEDAKLQLSKDTYDDDLDNLLAQIGDQYADLFLAAKNLS DAILLSDILRVNTEITKAPLSASMIKRYDEHHQDLTLLKALVRQQLPEKYKEIFFDQSKN GYAGYIDGGASQEEFYKFIKPILEKMDGTEELLVKLNREDLLRKQRTFDNGSIPHQIHLG ELHAILRRQEDFYPFLKDNREKIEKILTFRIPYYVGPLARGNSRFAWMTRKSEETITPWN FEEVVDKGASAQSFIERMTNFDKNLPNEKVLPKHSLLYEYFTVYNELTKVKYVTEGMR KPAFLSGEQKKAIVDLLFKTNRKVTVKQLKEDYFKKIECFDSVEISGVEDRFNASLGTY HDLLKIIKDKDFLDNEENEDILEDIVLTLTLFEDREMIEERLKTYAHLFDDKVMKQLKRR RYTGWGRLSRKLINGIRDKQSGKTILDFLKSDGFANRNFMQLIHDDSLTFKEDIQKAQV SGQGDSLHEHIANLAGSPAIKKGILQTVKVVDELVKVMGRHKPENIVIEMARENQTTQK GQKNSRERMKRIEEGIKELGSQILKEHPVENTQLQNEKLYLYYLQNGRDMYVDQELDI NRLSDYDVDHIVPQSFLKDDSIDNKVLTRSDKNRGKSDNVPSEEVVKKMKNYWRQLL NAKLITQRKFDNLTKAERGGLSELDKAGFIKRQLVETRQITKHVAQILDSRMNTKYDEN DKLIREVKVITLKSKLVSDFRKDFQFYKVREINNYHHAHDAYLNAVVGTALIKKYPKLE SEFVYGDYKVYDVRKMIAKSEQEIGKATAKYFFYSNIMNFFKTEITLANGEIRKRPLIET NGETGEIVWDKGRDFATVRKVLSMPQVNIVKKTEVQTGGFSKESILPKRNSDKLIARKK DWDPKKYGGFVSPTVAYSVLVVAKVEKGKSKKLKSVKELLGITIMERSSFEKNPIDFLE AKGYKEVKKDLIIKLPKYSLFELENGRKRMLASAGELQKGNELALPSKYVNFLYLASH YEKLKGSPEDNEQKQLFVEQHKHYLDEIIEQISEFSKRVILADANLDKVLSAYNKHRDK PIREQAENIIHLFTLTNLGAPAAFKYFDTTIDRKQYRSTKEVLDATLIHQSITGLYETRIDL SQLGGD (SEQ ID NO: 82). In this sequence, residues V1135, Q1335, and R1336, which can be mutated from D1135, R1335, and T1336 to yield a SpVQR Cas9, are underlined and in bold.

[0286] The amino acid sequence of an exemplary PAM-binding SpVRER Cas9 is as follows:

(SEQ ID NO: 83)
MDKKYSIGLAIGTNSVGWAVITDEYKVPSKKFKVLGNTDRHSIKKNLIGA
LLFDSGETAEATRLKRTARRRYTRRKNRICYLQEIFSNEMAKVDDSFFHR
LEESFLVEEDKKHERHPIFGNIVDEVAYHEKYPTIYHLRKKLVDSTDKAD
LRLIYLALAHMIKFRGHFLIEGDLNPDNSDVDKLFIQLVQTYNQLFEENP
INASGVDAKAILSARLSKSRRLENLIAQLPGEKKNGLFGNLIALSLGLTP
NFKSNFDLAEDAKLQLSKDTYDDDLDNLLAQIGDQYADLFLAAKNLSDAI
LLSDILRVNTEITKAPLSASMIKRYDEHHQDLTLLKALVRQQLPEKYKEI
FFDQSKNGYAGYIDGGASQEEFYKFIKPILEKMDGTEELLVKLNREDLLR
KQRTFDNGSIPHQIHLGELHAILRRQEDFYPFLKDNREKIEKILTFRIPY
YVGPLARGNSRFAWMTRKSEETITPWNFEEVVDKGASAQSFIERMTNFDK
NLPNEKVLPKHSLLYEYFTVYNELTKVKYVTEGMRKPAFLSGEQKKAIVD
LLFKTNRKVTVKQLKEDYFKKIECFDSVEISGVEDRFNASLGTYHDLLKI
IKDKDFLDNEENEDILEDIVLTLTLFEDREMIEERLKTYAHLFDDKVMKQ
LKRRRYTGWGRLSRKLINGIRDKQSGKTILDFLKSDGFANRNFMQLIHDD
SLTFKEDIQKAQVSGQGDSLHEHIANLAGSPAIKKGILQTVKVVDELVKV
MGRHKPENIVIEMARENQTTQKGQKNSRERMKRIEEGIKELGSQILKEHP
VENTQLQNEKLYLYYLQNGRDMYVDQELDINRLSDYDVDHIVPQSFLKDD
SIDNKVLTRSDKNRGKSDNVPSEEVVKKMKNYWRQLLNAKLITQRKFDNL
TKAERGGLSELDKAGFIKRQLVETRQITKHVAQILDSRMNTKYDENDKLI
REVKVITLKSKLVSDFRKDFQFYKVREINNYHHAHDAYLNAVVGTALIKK
YPKLESEFVYGDYKVYDVRKMIAKSEQEIGKATAKYFFYSNIMNFFKTEI
TLANGEIRKRPLIETNGETGEIVWDKGRDFATVRKVLSMPQVNIVKKTEV
QTGGFSKESILPKRNSDKLIARKKDWDPKKYGGFVSPTVAYSVLVVAKVE
KGKSKKLKSVKELLGITIMERSSFEKNPIDFLEAKGYKEVKKDLIIKLPK
YSLFELENGRKRMLASARELQKGNELALPSKYVNFLYLASHYEKLKGSPE
DNEQKQLFVEQHKHYLDEIIEQISEFSKRVILADANLDKVLSAYNKHRDK
PIREQAENIIHLFTLTNLGAPAAFKYFDTTIDRKEYRSTKEVLDATLIHQ
SITGLYETRIDLSQLGGD.

[0287] In some embodiments, the Cas9 domain is a recombinant Cas9 domain. In some embodiments, the recombinant Cas9 domain is a SpyMacCas9 domain. In some embodiments, the SpyMacCas9 domain is a nuclease active SpyMacCas9, a nuclease inactive SpyMacCas9 (SpyMacCas9d), or a SpyMacCas9 nickase (SpyMacCas9n). In some embodiments, the SaCas9 domain, the SaCas9d domain, or the SaCas9n domain can bind to a nucleic acid sequence having a non-canonical PAM. In some embodiments, the SpyMacCas9 domain, the SpCas9d domain, or the SpCas9n domain can bind to a nucleic acid sequence having a NAA PAM sequence.

[0288] Exemplary SpyMacCas9

(SEQ ID NO: 84)
MDKKYSIGLDIGTNSVGWAVITDDYKVPSKKFKVLGNTDRHSIKKNLIGA
LLFGSGETAEATRLKRTARRRYTRRKNRICYLQEIFSNEMAKVDDSFFHR
LEESFLVEEDKKHERHPIFGNIVDEVAYHEKYPTIYHLRKKLADSTDKAD
LRLIYLALAHMIKFRGHFLIEGDLNPDNSDVDKLFIQLVQIYNQLFEENP
INASRVDAKAILSARLSKSRRLENLIAQLPGEKRNGLFGNLIALSLGLTP
NFKSNFDLAEDAKLQLSKDTYDDDLDNLLAQIGDQYADLFLAAKNLSDAI
LLSDILRVNSEITKAPLSASMIKRYDEHHQDLTLLKALVRQQLPEKYKEI
FFDQSKNGYAGYIDGGASQEEFYKFIKPILEKMDGTEELLVKLNREDLLR
KQRTFDNGSIPHQIHLGELHAILRRQEDFYPFLKDNREKIEKILTFRIPY
YVGPLARGNSRFAWMTRKSEETITPWNFEEVVDKGASAQSFIERMTNFDK
NLPNEKVLPKHSLLYEYFTVYNELTKVKYVTEGMRKPAFLSGEQKKAIVD
LLFKTNRKVTVKQLKEDYFKKIECFDSVEISGVEDRFNASLGAYHDLLKI
IKDKDFLDNEENEDILEDIVLTLTLFEDRGMIEERLKTYAHLFDDKVMKQ
LKRRRYTGWGRLSRKLINGIRDKQSGKTILDFLKSDGFANRNFMQLIHDD
SLTFKEDIQKAQVSGQGHSLHEQIANLAGSPAIKKGILQTVKIVDELVKV
MGHKPENIVIEMARENQTTQKGQKNSRERMKRIEEGIKELGSQILKEHPV
ENTQLQNEKLYLYYLQNGRDMYVDQELDINRLSDYDVDHIVPQSFIKDDS
IDNKVLTRSDKNRGKSDNVPSEEVVKKMKNYWRQLLNAKLITQRKFDNLT
KAERGGLSELDKAGFIKRQLVETRQITKHVAQILDSRMNTKYDENDKLIR
EVKVITLKSKLVSDFRKDFQFYKVREINNYHHAHDAYLNAVVGTALIKKY
PKLESEFVYGDYKVYDVRKMIAKSEQEIGKATAKYFFYSNIMNFFKTEIT
LANGEIRKRPLIETNGETGEIVWDKGRDFATVRKVLSMPQVNIVKKTEIQ
TVGQNGGLFDDNPKSPLEVTPSKLVPLKKELNPKKYGGYQKPTTAYPVLL
ITDTKQLIPISVMNKKQFEQNPVKFLRDRGYQQVGKNDFIKLPKYTLVDI
GDGIKRLWASSKEIHKGNQLVVSKKSQILLYHAHHLDSDLSNDYLQNHNQ
QFDVLFNEIISFSKKCKLGKEHIQKIENVYSNKKNSASIEELAESFIKLL
GFTQLGATSPFNFLGVKLNQKQYKGKKDYILPCTEGTLIRQSITGLYETR
VDLSKIGED.

[0289] In some cases, a variant Cas9 protein harbors, H840A, P475A, W476A, N477A, D1125A, W1126A, and D1218A mutations such that the polypeptide has a reduced ability to cleave a target DNA or RNA. Such a Cas9 protein has a reduced ability to cleave a target DNA (e.g., a single stranded target DNA) but retains the ability to bind a target DNA (e.g., a single stranded target DNA). As another non-limiting example, in some cases, the variant Cas9 protein harbors D10A, H840A, P475A, W476A, N477A, D1125A, W1126A, and D1218A mutations such that the polypeptide has a reduced ability to cleave a target DNA. Such a Cas9 protein has a reduced ability to cleave a target DNA (e.g., a single stranded target DNA) but retains the ability to bind a target DNA (e.g., a single stranded target DNA). In some cases, when a variant Cas9 protein harbors W476A and W1126A mutations or when the variant Cas9 protein harbors P475A, W476A, N477A, D1125A, W1126A, and D1218A mutations, the variant Cas9 protein does not bind efficiently to a PAM sequence. Thus, in some such cases, when such a variant Cas9 protein is used in a method of binding, the method does not require a PAM sequence. In other words, in some cases, when such a variant Cas9 protein is used in a method of binding, the method can include a guide RNA, but the method can be performed in the absence of a PAM sequence (and the specificity of binding is therefore provided by the targeting segment of the guide RNA). Other residues can be mutated to achieve the above effects (i.e., inactivate one or the other nuclease portions). As non-limiting examples, residues D10, G12, G17, E762, H840, N854, N863, H982, H983, A984, D986, and/or A987 can be altered (i.e., substituted). Also, mutations other than alanine substitutions are suitable.

[0290] In some embodiments, a CRISPR protein-derived domain of a base editor can comprise all or a portion of a Cas9 protein with a canonical PAM sequence (NGG). In other embodiments, a Cas9-derived domain of a base editor can employ a non-canonical PAM sequence. Such sequences have been described in the art and would be apparent to the skilled artisan. For example, Cas9 domains that bind non-canonical PAM sequences have been described in Kleinstiver, B. P., et al., “Engineered CRISPR-Cas9 nucleases with altered PAM specificities” Nature 523, 481-485 (2015); and Kleinstiver, B. P., et al., “Broadening the targeting range of Staphylococcus aureus CRISPR-Cas9 by modifying PAM recognition” Nature Biotechnology 33, 1293-1298 (2015); the entire contents of each are hereby incorporated by reference.

[0291] In some examples, a PAM recognized by a CRISPR protein-derived domain of a base editor disclosed herein can be provided to a cell on a separate oligonucleotide to an insert (e.g. an AAV insert) encoding the base editor. In such cases, providing PAM on a separate oligonucleotide can allow cleavage of a target sequence that otherwise would not be able to be cleaved, because no adjacent PAM is present on the same polynucleotide as the target sequence.

[0292] In an embodiment, S. pyogenes Cas9 (SpCas9) can be used as a CRISPR endonuclease for genome engineering. However, others can be used. In some cases, a different endonuclease can be used to target certain genomic targets. In some cases, synthetic SpCas9-derived variants with non-NGG PAM sequences can be used. Additionally, other Cas9 orthologues from various species have been identified and these “non-SpCas9s” can bind a variety of PAM sequences that can also be useful for the present disclosure. For example, the relatively large size of SpCas9 (approximately 4 kb coding sequence) can lead to plasmids carrying the SpCas9 cDNA that cannot be efficiently expressed in a cell. Conversely, the coding sequence for Staphylococcus aureus Cas9 (SaCas9) is approximately 1 kilo base shorter than SpCas9, possibly allowing it to be efficiently expressed in a cell. Similar to SpCas9, the SaCas9 endonuclease is capable of modifying target genes in mammalian cells in vitro and in mice in vivo. In some cases, a Cas protein can target a different PAM sequence. In some cases, a target gene can be adjacent to a Cas9 PAM, 5′-NGG, for example. In other cases, other Cas9 orthologs can have different PAM requirements. For example, other PAMs such as those of S. thermophilus (5′-NNAGAA for CRISPR1 and 5′-NGGNG for CRISPR3) and Neisseria meningitidis (5′-NNNNGATT) can also be found adjacent to a target gene.

[0293] In some embodiments, for a S. pyogenes system, a target gene sequence can precede (i.e., be 5′ to) a 5′-NGG PAM, and a 20-nt guide RNA sequence can base pair with an opposite strand to mediate a Cas9 cleavage adjacent to a PAM. In some cases, an adjacent cut can be or can be about 3 base pairs upstream of a PAM. In some cases, an adjacent cut can be or can be about 10 base pairs upstream of a PAM. In some cases, an adjacent cut can be or can be about 0-20 base pairs upstream of a PAM. For example, an adjacent cut can be next to, 1, 2, 3, 4, 5, 6, 7, 8, 9, 10, 11, 12, 13, 14, 15, 16, 17, 18, 19, 20, 21, 22, 23, 24, 25, 26, 27, 28, 29, or 30 base pairs upstream of a PAM. An adjacent cut can also be downstream of a PAM by 1 to 30 base pairs. Fusion proteins comprising a nuclear localization sequence (NLS)

[0294] In some embodiments, the fusion proteins provided herein further comprise one or more (e.g., 2, 3, 4, 5) nuclear targeting sequences, for example a nuclear localization sequence (NLS). In one embodiment, a bipartite NLS is used. In some embodiments, a NLS comprises an amino acid sequence that facilitates the importation of a protein, that comprises an NLS, into the cell nucleus (e.g., by nuclear transport). In some embodiments, any of the fusion proteins provided herein further comprise a nuclear localization sequence (NLS). In some embodiments, the NLS is fused to the N-terminus of the fusion protein. In some embodiments, the NLS is fused to the C-terminus of the fusion protein. In some embodiments, the NLS is fused to the N-terminus of the Cas9 domain. In some embodiments, the NLS is fused to the C-terminus of an nCas9 domain or a dCas9 domain. In some embodiments, the NLS is fused to the N-terminus of the deaminase. In some embodiments, the NLS is fused to the C-terminus of the deaminase. In some embodiments, the NLS is fused to the fusion protein via one or more linkers. In some embodiments, the NLS is fused to the fusion protein without a linker. In some embodiments, the NLS comprises an amino acid sequence of any one of the NLS sequences provided or referenced herein. Additional nuclear localization sequences are known in the art and would be apparent to the skilled artisan. For example, NLS sequences are described in Plank et al., PCT/EP2000/011690, the contents of which are incorporated herein by reference for their disclosure of exemplary nuclear localization sequences. In some embodiments, an NLS comprises the amino acid sequence PKKKRKVEGADKRTADGSEFESPKKKRKV (SEQ ID NO: 85), KRTADGSEFESPKKKRKV (SEQ ID NO: 40), KRPAATKKAGQAKKKK (SEQ ID NO: 41), KKTELQTTNAENKTKKL (SEQ ID NO: 42), KRGINDRNFWRGENGRKTR (SEQ ID NO: 43), RKSGKIAAIVVKRPRKPKKKRKV (SEQ ID NO: 86), or MDSLLMNRRKFLYQFKNVRWAKGRRETYLC (SEQ ID NO: 46). In some embodiments, the NLS is present in a linker or the NLS is flanked by linkers, for example, the linkers described herein. In some embodiments, the N-terminus or C-terminus NLS is a bipartite NLS. A bipartite NLS comprises two basic amino acid clusters, which are separated by a relatively short spacer sequence (hence bipartite—2 parts, while monopartite NLSs are not). The NLS of nucleoplasmin, KR[PAATKKAGQA]KKKK (SEQ ID NO: 304), is the prototype of the ubiquitous bipartite signal: two clusters of basic amino acids, separated by a spacer of about 10 amino acids. The sequence of an exemplary bipartite NLS follows:

(SEQ ID NO: 85)
PKKKRKVEGADKRTADGSEFES PKKKRKV.

[0295] In some embodiments, the fusion proteins of the invention do not comprise a linker sequence. In some embodiments, linker sequences between one or more of the domains or proteins are present.

[0296] It should be appreciated that the fusion proteins of the present disclosure may comprise one or more additional features. For example, in some embodiments, the fusion protein may comprise inhibitors, cytoplasmic localization sequences, export sequences, such as nuclear export sequences, or other localization sequences, as well as sequence tags that are useful for solubilization, purification, or detection of the fusion proteins. Suitable protein tags provided herein include, but are not limited to, biotin carboxylase carrier protein (BCCP) tags, myc-tags, calmodulin-tags, FLAG-tags, hemagglutinin (HA)-tags, polyhistidine tags, also referred to as histidine tags or His-tags, maltose binding protein (MBP)-tags, nus-tags, glutathione-S-transferase (GST)-tags, green fluorescent protein (GFP)-tags, thioredoxin-tags, S-tags, Softags (e.g., Softag 1, Softag 3), strep-tags, biotin ligase tags, FlAsH tags, V5 tags, and SBP-tags. Additional suitable sequences will be apparent to those of skill in the art. In some embodiments, the fusion protein comprises one or more His tags.

[0297] A vector that encodes a CRISPR enzyme comprising one or more nuclear localization sequences (NLSs) can be used. For example, there can be or be about 1, 2, 3, 4, 5, 6, 7, 8, 9, 10 NLSs used. A CRISPR enzyme can comprise the NLSs at or near the ammo-terminus, about or more than about 1, 2, 3, 4, 5, 6, 7, 8, 9, 10 NLSs at or near the carboxy-terminus, or any combination of these (e.g., one or more NLS at the ammo-terminus and one or more NLS at the carboxy terminus). When more than one NLS is present, each can be selected independently of others, such that a single NLS can be present in more than one copy and/or in combination with one or more other NLSs present in one or more copies.

[0298] CRISPR enzymes used in the methods can comprise about 6 NLSs. An NLS is considered near the N- or C-terminus when the nearest amino acid to the NLS is within about 50 amino acids along a polypeptide chain from the N- or C-terminus, e.g., within 1, 2, 3, 4, 5, 10, 15, 20, 25, 30, 40, or 50 amino acids.

[0299] In some embodiments, an NLS comprises the amino acid sequence

(SEQ ID NO: 85)
PKKKRKVEGADKRTADGSEFES PKKKRKV,
(SEQ ID NO: 40)
KRTADGSEFESPKKKRKV,
(SEQ ID NO: 41)
KRPAATKKAGQAKKKK,
(SEQ ID NO: 42)
KKTELQTTNAENKTKKL,
(SEQ ID NO: 43)
KRGINDRNFWRGENGRKTR,
(SEQ ID NO: 86)
RKSGKIAAIVVKRPRKPKKKRKV,
or
(SEQ ID NO: 46)
MDSLLMNRRKFLYQFKNVRWAKGRRETYLC.

[0300] In some embodiments, the NLS is present in a linker or the NLS is flanked by linkers, for example, the linkers described herein. In some embodiments, the N-terminus or C-terminus NLS is a bipartite NLS. A bipartite NLS comprises two basic amino acid clusters, which are separated by a relatively short spacer sequence (hence bipartite—2 parts, while monopartite NLSs are not). The NLS of nucleoplasmin, KR[PAATKKAGQA]KKKK (SEQ ID NO: 304), is the prototype of the ubiquitous bipartite signal: two clusters of basic amino acids, separated by a spacer of about 10 amino acids. The sequence of an exemplary bipartite NLS follows:

(SEQ ID NO: 85)
PKKKRKVEGADKRTADGSEFES PKKKRKV

[0301] In some embodiments, the fusion proteins of the invention do not comprise a linker sequence. In some embodiments, linker sequences between one or more of the domains or proteins are present.

[0302] The PAM sequence can be any PAM sequence known in the art. Suitable PAM sequences include, but are not limited to, NGG, NGA, NGC, NGN, NGT, NGCG, NGAG, NGAN, NGNG, NGCN, NGCG, NGTN, NNGRRT, NNNRRT, NNGRR(N), TTTV, TYCV, TYCV, TATV, NNNNGATT, NNAGAAW, or NAAAAC. Y is a pyrimidine; N is any nucleotide base; W is A or T.

### Nucleobase Editing Domain

[0303] Described herein are base editors comprising a fusion protein that includes a polynucleotide programmable nucleotide binding domain and a nucleobase editing domain (e.g., deaminase domain). The base editor can be programmed to edit one or more bases in a target polynucleotide sequence by interacting with a guide polynucleotide capable of recognizing the target sequence. Once the target sequence has been recognized, the base editor is anchored on the polynucleotide where editing is to occur and the deaminase domain component of the base editor can then edit a target base.

[0304] In some embodiments, the nucleobase editing domain is a deaminase domain. In some cases, a deaminase domain can be a cytosine deaminase or a cytidine deaminase. In some embodiments, the terms “cytosine deaminase” and “cytidine deaminase” can be used interchangeably. In some cases, a deaminase domain can be an adenine deaminase or an adenosine deaminase. In some embodiments, the terms “adenine deaminase” and “adenosine deaminase” can be used interchangeably. Details of nucleobase editing proteins are described in International PCT Application Nos. PCT/2017/045381 (WO2018/027078) and PCT/US2016/058344 (WO2017/070632), each of which is incorporated herein by reference for its entirety. Also see Komor, A. C., et al., “Programmable editing of a target base in genomic DNA without double-stranded DNA cleavage” Nature 533, 420-424 (2016); Gaudelli, N. M., et al., “Programmable base editing of A⋅T to G⋅C in genomic DNA without DNA cleavage” Nature 551, 464-471 (2017); and Komor, A. C., et al., “Improved base excision repair inhibition and bacteriophage Mu Gam protein yields C:G-to-T:A base editors with higher efficiency and product purity” Science Advances 3:eaao4774 (2017), the entire contents of which are hereby incorporated by reference.

### C to T Editing

[0305] In some embodiments, a base editor disclosed herein comprises a fusion protein comprising cytidine deaminase capable of deaminating a target cytidine (C) base of a polynucleotide to produce uridine (U), which has the base pairing properties of thymine. In some embodiments, for example where the polynucleotide is double-stranded (e.g. DNA), the uridine base can then be substituted with a thymidine base (e.g. by cellular repair machinery) to give rise to a C:G to a T:A transition. In other embodiments, deamination of a C to U in a nucleic acid by a base editor cannot be accompanied by substitution of the U to a T.

[0306] The deamination of a target C in a polynucleotide to give rise to a U is a non-limiting example of a type of base editing that can be executed by a base editor described herein. In another example, a base editor comprising a cytidine deaminase domain can mediate conversion of a cytosine (C) base to a guanine (G) base. For example, a U of a polynucleotide produced by deamination of a cytidine by a cytidine deaminase domain of a base editor can be excised from the polynucleotide by a base excision repair mechanism (e.g., by a uracil DNA glycosylase (UDG) domain), producing an abasic site. The nucleobase opposite the abasic site can then be substituted (e.g. by base repair machinery) with another base, such as a C, by for example a translesion polymerase. Although it is typical for a nucleobase opposite an abasic site to be replaced with a C, other substitutions (e.g. A, G or T) can also occur.

[0307] Accordingly, in some embodiments a base editor described herein comprises a deamination domain (e.g., cytidine deaminase domain) capable of deaminating a target C to a U in a polynucleotide. Further, as described below, the base editor can comprise additional domains which facilitate conversion of the U resulting from deamination to, in some embodiments, a T or a G. For example, a base editor comprising a cytidine deaminase domain can further comprise a uracil glycosylase inhibitor (UGI) domain to mediate substitution of a U by a T, completing a C-to-T base editing event. In another example, a base editor can incorporate a translesion polymerase to improve the efficiency of C-to-G base editing, since a translesion polymerase can facilitate incorporation of a C opposite an abasic site (i.e., resulting in incorporation of a G at the abasic site, completing the C-to-G base editing event).

[0308] A base editor comprising a cytidine deaminase as a domain can deaminate a target C in any polynucleotide, including DNA, RNA and DNA-RNA hybrids. Typically, a cytidine deaminase catalyzes a C nucleobase that is positioned in the context of a single-stranded portion of a polynucleotide. In some embodiments, the entire polynucleotide comprising a target C can be single-stranded. For example, a cytidine deaminase incorporated into the base editor can deaminate a target C in a single-stranded RNA polynucleotide. In other embodiments, a base editor comprising a cytidine deaminase domain can act on a double-stranded polynucleotide, but the target C can be positioned in a portion of the polynucleotide which at the time of the deamination reaction is in a single-stranded state. For example, in embodiments where the NAGPB domain comprises a Cas9 domain, several nucleotides can be left unpaired during formation of the Cas9-gRNA-target DNA complex, resulting in formation of a Cas9 “R-loop complex”. These unpaired nucleotides can form a bubble of single-stranded DNA that can serve as a substrate for a single-strand specific nucleotide deaminase enzyme (e.g., cytidine deaminase).

[0309] In some embodiments, a cytidine deaminase of a base editor can comprise all or a portion of an apolipoprotein B mRNA editing complex (APOBEC) family deaminase. APOBEC is a family of evolutionarily conserved cytidine deaminases. Members of this family are C-to-U editing enzymes. The N-terminal domain of APOBEC like proteins is the catalytic domain, while the C-terminal domain is a pseudocatalytic domain. More specifically, the catalytic domain is a zinc dependent cytidine deaminase domain and is important for cytidine deamination. APOBEC family members include APOBEC1, APOBEC2, APOBEC3A, APOBEC3B, APOBEC3C, APOBEC3D (“APOBEC3E” now refers to this), APOBEC3F, APOBEC3G, APOBEC3H, APOBEC4, and Activation-induced (cytidine) deaminase. In some embodiments, a deaminase incorporated into a base editor comprises all or a portion of an APOBEC1 deaminase. In some embodiments, a deaminase incorporated into a base editor comprises all or a portion of APOBEC2 deaminase. In some embodiments, a deaminase incorporated into a base editor comprises all or a portion of is an APOBEC3 deaminase. In some embodiments, a deaminase incorporated into a base editor comprises all or a portion of an APOBEC3A deaminase. In some embodiments, a deaminase incorporated into a base editor comprises all or a portion of APOBEC3B deaminase. In some embodiments, a deaminase incorporated into a base editor comprises all or a portion of APOBEC3C deaminase. In some embodiments, a deaminase incorporated into a base editor comprises all or a portion of APOBEC3D deaminase. In some embodiments, a deaminase incorporated into a base editor comprises all or a portion of APOBEC3E deaminase. In some embodiments, a deaminase incorporated into a base editor comprises all or a portion of APOBEC3F deaminase. In some embodiments, a deaminase incorporated into a base editor comprises all or a portion of APOBEC3G deaminase. In some embodiments, a deaminase incorporated into a base editor comprises all or a portion of APOBEC3H deaminase. In some embodiments, a deaminase incorporated into a base editor comprises all or a portion of APOBEC4 deaminase. In some embodiments, a deaminase incorporated into a base editor comprises all or a portion of activation-induced deaminase (AID). In some embodiments a deaminase incorporated into a base editor comprises all or a portion of cytidine deaminase 1 (CDA1). It should be appreciated that a base editor can comprise a deaminase from any suitable organism (e.g., a human or a rat). In some embodiments, a deaminase domain of a base editor is from a human, chimpanzee, gorilla, monkey, cow, dog, rat, or mouse. In some embodiments, the deaminase domain of the base editor is derived from rat (e.g., rat APOBEC1). In some embodiments, the deaminase domain of the base editor is human APOBEC1. In some embodiments, the deaminase domain of the base editor is pmCDA1.

[0310] The amino acid and nucleic acid sequences of PmCDA1 are shown herein below.

>tr|A5H718|A5H718_PETMA Cytosine deaminase OS=Petromyzon marinus OX=7757 PE=2 SV=1 amino acid sequence:

(SEQ ID NO: 87)
MTDAEYVRIHEKLDIYTFKKQFFNNKKSVSHRCYVLFELKRRGERRACFW
GYAVNKPQSGTERGIHAEIFSIRKVEEYLRDNPGQFTINWYSSWSPCADC
AEKILEWYNQELRGNGHTLKIWACKLYYEKNARNQIGLWNLRDNGVGLNV
MVSEHYQCCRKIFIQSSHNQLNENRWLEKTLKRAEKRRSELSIMIQVKIL
HTTKSPAV

Nucleic acid sequence: >EF094822.1 Petromyzon marinus isolate PmCDA.21 cytosine deaminase mRNA, complete cds:

(SEQ ID NO: 88)
TGACACGACACAGCCGTGTATATGAGGAAGGGTAGCTGGATGGGGGGGGG
GGGAATACGTTCAGAGAGGACATTAGCGAGCGTCTTGTTGGTGGCCTTGA
GTCTAGACACCTGCAGACATGACCGACGCTGAGTACGTGAGAATCCATGA
GAAGTTGGACATCTACACGTTTAAGAAACAGTTTTTCAACAACAAAAAAT
CCGTGTCGCATAGATGCTACGTTCTCTTTGAATTAAAACGACGGGGTGAA
CGTAGAGCGTGTTTTTGGGGCTATGCTGTGAATAAACCACAGAGCGGGAC
AGAACGTGGAATTCACGCCGAAATCTTTAGCATTAGAAAAGTCGAAGAAT
ACCTGCGCGACAACCCCGGACAATTCACGATAAATTGGTACTCATCCTGG
AGTCCTTGTGCAGATTGCGCTGAAAAGATCTTAGAATGGTATAACCAGGA
GCTGCGGGGGAACGGCCACACTTTGAAAATCTGGGCTTGCAAACTCTATT
ACGAGAAAAATGCGAGGAATCAAATTGGGCTGTGGAACCTCAGAGATAAC
GGGGTTGGGTTGAATGTAATGGTAAGTGAACACTACCAATGTTGCAGGAA
AATATTCATCCAATCGTCGCACAATCAATTGAATGAGAATAGATGGCTTG
AGAAGACTTTGAAGCGAGCTGAAAAACGACGGAGCGAGTTGTCCATTATG
ATTCAGGTAAAAATACTCCACACCACTAAGAGTCCTGCTGTTTAAGAGGC
TATGCGGATGGTTTTC

The amino acid and nucleic acid sequences of the coding sequence (CDS) of human activation-induced cytidine deaminase (AID) are shown below.
>tr|Q6QJ80|Q6QJ80_HUMAN Activation-induced cytidine deaminase OS=Homo sapiens OX=9606 GN=AICDA PE=2 SV=1 amino acid sequence:

(SEQ ID NO: 89)
MDSLLMNRRKFLYQFKNVRWAKGRRETYLCYVVKRRDSATSFSLDFGYLR
NKNGCHVELLFLRYISDWDLDPGRCYRVTWFTSWSPCYDCARHVADFLRG
NPNLSLRIFTARLYFCEDRKAEPEGLRRLHRAGVQIAIMTFKAPV

The amino acid and nucleic acid sequences of the coding sequence (CDS) of human activation-induced cytidine deaminase (AID) are shown below.
>tr|Q6QJ80|Q6QJ80_HUMAN Activation-induced cytidine deaminase OS=Homo sapiens OX=9606 GN=AICDA PE=2 SV=1 amino acid sequence:

(SEQ ID NO: 90)
MDSLLMNRRKFLYQFKNVRWAKGRRETYLCYVVKRRDSATSFSLDFGYLR
NKNGCHVELLFLRYISDWDLDPGRCYRVTWFTSWSPCYDCARHVADFLRG
NPNLSLRIFTARLYFCEDRKAEPEGLRRLHRAGVQIAIMTFKAPV

Nucleic acid sequence: >NG_011588.1:5001-15681 Homo sapiens activation induced cytidine deaminase (AICDA), RefSeqGene (LRG_17) on chromosome 12:

(SEQ ID NO: 91)
AGAGAACCATCATTAATTGAAGTGAGATTTTTCTGGCCTGAGACTTGCAGGGAGGCAAGAAGACACTCTG
GACACCACTATGGACAGGTAAAGAGGCAGTCTTCTCGTGGGTGATTGCACTGGCCTTCCTCTCAGAGCAA
ATCTGAGTAATGAGACTGGTAGCTATCCCTTTCTCTCATGTAACTGTCTGACTGATAAGATCAGCTTGAT
CAATATGCATATATATTTTTTGATCTGTCTCCTTTTCTTCTATTCAGATCTTATACGCTGTCAGCCCAAT
TCTTTCTGTTTCAGACTTCTCTTGATTTCCCTCTTTTTCATGTGGCAAAAGAAGTAGTGCGTACAATGTA
CTGATTCGTCCTGAGATTTGTACCATGGTTGAAACTAATTTATGGTAATAATATTAACATAGCAAATCTT
TAGAGACTCAAATCATGAAAAGGTAATAGCAGTACTGTACTAAAAACGGTAGTGCTAATTTTCGTAATAA
TTTTGTAAATATTCAACAGTAAAACAACTTGAAGACACACTTTCCTAGGGAGGCGTTACTGAAATAATTT
AGCTATAGTAAGAAAATTTGTAATTTTAGAAATGCCAAGCATTCTAAATTAATTGCTTGAAAGTCACTAT
GATTGTGTCCATTATAAGGAGACAAATTCATTCAAGCAAGTTATTTAATGTTAAAGGCCCAATTGTTAGG
CAGTTAATGGCACTTTTACTATTAACTAATCTTTCCATTTGTTCAGACGTAGCTTAACTTACCTCTTAGG
TGTGAATTTGGTTAAGGTCCTCATAATGTCTTTATGTGCAGTTTTTGATAGGTTATTGTCATAGAACTTA
TTCTATTCCTACATTTATGATTACTATGGATGTATGAGAATAACACCTAATCCTTATACTTTACCTCAAT
TTAACTCCTTTATAAAGAACTTACATTACAGAATAAAGATTTTTTAAAAATATATTTTTTTGTAGAGACA
GGGTCTTAGCCCAGCCGAGGCTGGTCTCTAAGTCCTGGCCCAAGCGATCCTCCTGCCTGGGCCTCCTAAA
GTGCTGGAATTATAGACATGAGCCATCACATCCAATATACAGAATAAAGATTTTTAATGGAGGATTTAAT
GTTCTTCAGAAAATTTTCTTGAGGTCAGACAATGTCAAATGTCTCCTCAGTTTACACTGAGATTTTGAAA
ACAAGTCTGAGCTATAGGTCCTTGTGAAGGGTCCATTGGAAATACTTGTTCAAAGTAAAATGGAAAGCAA
AGGTAAAATCAGCAGTTGAAATTCAGAGAAAGACAGAAAAGGAGAAAAGATGAAATTCAACAGGACAGAA
GGGAAATATATTATCATTAAGGAGGACAGTATCTGTAGAGCTCATTAGTGATGGCAAAATGACTTGGTCA
GGATTATTTTTAACCCGCTTGTTTCTGGTTTGCACGGCTGGGGATGCAGCTAGGGTTCTGCCTCAGGGAG
CACAGCTGTCCAGAGCAGCTGTCAGCCTGCAAGCCTGAAACACTCCCTCGGTAAAGTCCTTCCTACTCAG
GACAGAAATGACGAGAACAGGGAGCTGGAAACAGGCCCCTAACCAGAGAAGGGAAGTAATGGATCAACAA
AGTTAACTAGCAGGTCAGGATCACGCAATTCATTTCACTCTGACTGGTAACATGTGACAGAAACAGTGTA
GGCTTATTGTATTTTCATGTAGAGTAGGACCCAAAAATCCACCCAAAGTCCTTTATCTATGCCACATCCT
TCTTATCTATACTTCCAGGACACTTTTTCTTCCTTATGATAAGGCTCTCTCTCTCTCCACACACACACAC
ACACACACACACACACACACACACACACACACAAACACACACCCCGCCAACCAAGGTGCATGTAAAAAGA
TGTAGATTCCTCTGCCTTTCTCATCTACACAGCCCAGGAGGGTAAGTTAATATAAGAGGGATTTATTGGT
AAGAGATGATGCTTAATCTGTTTAACACTGGGCCTCAAAGAGAGAATTTCTTTTCTTCTGTACTTATTAA
GCACCTATTATGTGTTGAGCTTATATATACAAAGGGTTATTATATGCTAATATAGTAATAGTAATGGTGG
TTGGTACTATGGTAATTACCATAAAAATTATTATCCTTTTAAAATAAAGCTAATTATTATTGGATCTTTT
TTAGTATTCATTTTATGTTTTTTATGTTTTTGATTTTTTAAAAGACAATCTCACCCTGTTACCCAGGCTG
GAGTGCAGTGGTGCAATCATAGCTTTCTGCAGTCTTGAACTCCTGGGCTCAAGCAATCCTCCTGCCTTGG
CCTCCCAAAGTGTTGGGATACAGTCATGAGCCACTGCATCTGGCCTAGGATCCATTTAGATTAAAATATG
CATTTTAAATTTTAAAATAATATGGCTAATTTTTACCTTATGTAATGTGTATACTGGCAATAAATCTAGT
TTGCTGCCTAAAGTTTAAAGTGCTTTCCAGTAAGCTTCATGTACGTGAGGGGAGACATTTAAAGTGAAAC
AGACAGCCAGGTGTGGTGGCTCACGCCTGTAATCCCAGCACTCTGGGAGGCTGAGGTGGGTGGATCGCTT
GAGCCCTGGAGTTCAAGACCAGCCTGAGCAACATGGCAAAACGCTGTTTCTATAACAAAAATTAGCCGGG
CATGGTGGCATGTGCCTGTGGTCCCAGCTACTAGGGGGCTGAGGCAGGAGAATCGTTGGAGCCCAGGAGG
TCAAGGCTGCACTGAGCAGTGCTTGCGCCACTGCACTCCAGCCTGGGTGACAGGACCAGACCTTGCCTCA
AAAAAATAAGAAGAAAAATTAAAAATAAATGGAAACAACTACAAAGAGCTGTTGTCCTAGATGAGCTACT
TAGTTAGGCTGATATTTTGGTATTTAACTTTTAAAGTCAGGGTCTGTCACCTGCACTACATTATTAAAAT
ATCAATTCTCAATGTATATCCACACAAAGACTGGTACGTGAATGTTCATAGTACCTTTATTCACAAAACC
CCAAAGTAGAGACTATCCAAATATCCATCAACAAGTGAACAAATAAACAAAATGTGCTATATCCATGCAA
TGGAATACCACCCTGCAGTACAAAGAAGCTACTTGGGGATGAATCCCAAAGTCATGACGCTAAATGAAAG
AGTCAGACATGAAGGAGGAGATAATGTATGCCATACGAAATTCTAGAAAATGAAAGTAACTTATAGTTAC
AGAAAGCAAATCAGGGCAGGCATAGAGGCTCACACCTGTAATCCCAGCACTTTGAGAGGCCACGTGGGAA
GATTGCTAGAACTCAGGAGTTCAAGACCAGCCTGGGCAACACAGTGAAACTCCATTCTCCACAAAAATGG
GAAAAAAAGAAAGCAAATCAGTGGTTGTCCTGTGGGGAGGGGAAGGACTGCAAAGAGGGAAGAAGCTCTG
GTGGGGTGAGGGTGGTGATTCAGGTTCTGTATCCTGACTGTGGTAGCAGTTTGGGGTGTTTACATCCAAA
AATATTCGTAGAATTATGCATCTTAAATGGGTGGAGTTTACTGTATGTAAATTATACCTCAATGTAAGAA
AAAATAATGTGTAAGAAAACTTTCAATTCTCTTGCCAGCAAACGTTATTCAAATTCCTGAGCCCTTTACT
TCGCAAATTCTCTGCACTTCTGCCCCGTACCATTAGGTGACAGCACTAGCTCCACAAATTGGATAAATGC
ATTTCTGGAAAAGACTAGGGACAAAATCCAGGCATCACTTGTGCTTTCATATCAACCATGCTGTACAGCT
TGTGTTGCTGTCTGCAGCTGCAATGGGGACTCTTGATTTCTTTAAGGAAACTTGGGTTACCAGAGTATTT
CCACAAATGCTATTCAAATTAGTGCTTATGATATGCAAGACACTGTGCTAGGAGCCAGAAAACAAAGAGG
AGGAGAAATCAGTCATTATGTGGGAACAACATAGCAAGATATTTAGATCATTTTGACTAGTTAAAAAAGC
AGCAGAGTACAAAATCACACATGCAATCAGTATAATCCAAATCATGTAAATATGTGCCTGTAGAAAGACT
AGAGGAATAAACACAAGAATCTTAACAGTCATTGTCATTAGACACTAAGTCTAATTATTATTATTAGACA
CTATGATATTTGAGATTTAAAAAATCTTTAATATTTTAAAATTTAGAGCTCTTCTATTTTTCCATAGTAT
TCAAGTTTGACAATGATCAAGTATTACTCTTTCTTTTTTTTTTTTTTTTTTTTTTTTTGAGATGGAGTTT
TGGTCTTGTTGCCCATGCTGGAGTGGAATGGCATGACCATAGCTCACTGCAACCTCCACCTCCTGGGTTC
AAGCAAAGCTGTCGCCTCAGCCTCCCGGGTAGATGGGATTACAGGCGCCCACCACCACACTCGGCTAATG
TTTGTATTTTTAGTAGAGATGGGGTTTCACCATGTTGGCCAGGCTGGTCTCAAACTCCTGACCTCAGAGG
ATCCACCTGCCTCAGCCTCCCAAAGTGCTGGGATTACAGATGTAGGCCACTGCGCCCGGCCAAGTATTGC
TCTTATACATTAAAAAACAGGTGTGAGCCACTGCGCCCAGCCAGGTATTGCTCTTATACATTAAAAAATA
GGCCGGTGCAGTGGCTCACGCCTGTAATCCCAGCACTTTGGGAAGCCAAGGCGGGCAGAACACCCGAGGT
CAGGAGTCCAAGGCCAGCCTGGCCAAGATGGTGAAACCCCGTCTCTATTAAAAATACAAACATTACCTGG
GCATGATGGTGGGCGCCTGTAATCCCAGCTACTCAGGAGGCTGAGGCAGGAGGATCCGCGGAGCCTGGCA
GATCTGCCTGAGCCTGGGAGGTTGAGGCTACAGTAAGCCAAGATCATGCCAGTATACTTCAGCCTGGGCG
ACAAAGTGAGACCGTAACAAAAAAAAAAAAATTTAAAAAAAGAAATTTAGATCAAGATCCAACTGTAAAA
AGTGGCCTAAACACCACATTAAAGAGTTTGGAGTTTATTCTGCAGGCAGAAGAGAACCATCAGGGGGTCT
TCAGCATGGGAATGGCATGGTGCACCTGGTTTTTGTGAGATCATGGTGGTGACAGTGTGGGGAATGTTAT
TTTGGAGGGACTGGAGGCAGACAGACCGGTTAAAAGGCCAGCACAACAGATAAGGAGGAAGAAGATGAGG
GCTTGGACCGAAGCAGAGAAGAGCAAACAGGGAAGGTACAAATTCAAGAAATATTGGGGGGTTTGAATCA
ACACATTTAGATGATTAATTAAATATGAGGACTGAGGAATAAGAAATGAGTCAAGGATGGTTCCAGGCTG
CTAGGCTGCTTACCTGAGGTGGCAAAGTCGGGAGGAGTGGCAGTTTAGGACAGGGGGCAGTTGAGGAATA
TTGTTTTGATCATTTTGAGTTTGAGGTACAAGTTGGACACTTAGGTAAAGACTGGAGGGGAAATCTGAAT
ATACAATTATGGGACTGAGGAACAAGTTTATTTTATTTTTTGTTTCGTTTTCTTGTTGAAGAACAAATTT
AATTGTAATCCCAAGTCATCAGCATCTAGAAGACAGTGGCAGGAGGTGACTGTCTTGTGGGTAAGGGTTT
GGGGTCCTTGATGAGTATCTCTCAATTGGCCTTAAATATAAGCAGGAAAAGGAGTTTATGATGGATTCCA
GGCTCAGCAGGGCTCAGGAGGGCTCAGGCAGCCAGCAGAGGAAGTCAGAGCATCTTCTTTGGTTTAGCCC
AAGTAATGACTTCCTTAAAAAGCTGAAGGAAAATCCAGAGTGACCAGATTATAAACTGTACTCTTGCATT
TTCTCTCCCTCCTCTCACCCACAGCCTCTTGATGAACCGGAGGAAGTTTCTTTACCAATTCAAAAATGTC
CGCTGGGCTAAGGGTCGGCGTGAGACCTACCTGTGCTACGTAGTGAAGAGGCGTGACAGTGCTACATCCT
TTTCACTGGACTTTGGTTATCTTCGCAATAAGGTATCAATTAAAGTCGGCTTTGCAAGCAGTTTAATGGT
CAACTGTGAGTGCTTTTAGAGCCACCTGCTGATGGTATTACTTCCATCCTTTTTTGGCATTTGTGTCTCT
ATCACATTCCTCAAATCCTTTTTTTTATTTCTTTTTCCATGTCCATGCACCCATATTAGACATGGCCCAA
AATATGTGATTTAATTCCTCCCCAGTAATGCTGGGCACCCTAATACCACTCCTTCCTTCAGTGCCAAGAA
CAACTGCTCCCAAACTGTTTACCAGCTTTCCTCAGCATCTGAATTGCCTTTGAGATTAATTAAGCTAAAA
GCATTTTTATATGGGAGAATATTATCAGCTTGTCCAAGCAAAAATTTTAAATGTGAAAAACAAATTGTGT
CTTAAGCATTTTTGAAAATTAAGGAAGAAGAATTTGGGAAAAAATTAACGGTGGCTCAATTCTGTCTTCC
AAATGATTTCTTTTCCCTCCTACTCACATGGGTCGTAGGCCAGTGAATACATTCAACATGGTGATCCCCA
GAAAACTCAGAGAAGCCTCGGCTGATGATTAATTAAATTGATCTTTCGGCTACCCGAGAGAATTACATTT
CCAAGAGACTTCTTCACCAAAATCCAGATGGGTTTACATAAACTTCTGCCCACGGGTATCTCCTCTCTCC
TAACACGCTGTGACGTCTGGGCTTGGTGGAATCTCAGGGAAGCATCCGTGGGGTGGAAGGTCATCGTCTG
GCTCGTTGTTTGATGGTTATATTACCATGCAATTTTCTTTGCCTACATTTGTATTGAATACATCCCAATC
TCCTTCCTATTCGGTGACATGACACATTCTATTTCAGAAGGCTTTGATTTTATCAAGCACTTTCATTTAC
TTCTCATGGCAGTGCCTATTACTTCTCTTACAATACCCATCTGTCTGCTTTACCAAAATCTATTTCCCCT
TTTCAGATCCTCCCAAATGGTCCTCATAAACTGTCCTGCCTCCACCTAGTGGTCCAGGTATATTTCCACA
ATGTTACATCAACAGGCACTTCTAGCCATTTTCCTTCTCAAAAGGTGCAAAAAGCAACTTCATAAACACA
AATTAAATCTTCGGTGAGGTAGTGTGATGCTGCTTCCTCCCAACTCAGCGCACTTCGTCTTCCTCATTCC
ACAAAAACCCATAGCCTTCCTTCACTCTGCAGGACTAGTGCTGCCAAGGGTTCAGCTCTACCTACTGGTG
TGCTCTTTTGAGCAAGTTGCTTAGCCTCTCTGTAACACAAGGACAATAGCTGCAAGCATCCCCAAAGATC
ATTGCAGGAGACAATGACTAAGGCTACCAGAGCCGCAATAAAAGTCAGTGAATTTTAGCGTGGTCCTCTC
TGTCTCTCCAGAACGGCTGCCACGTGGAATTGCTCTTCCTCCGCTACATCTCGGACTGGGACCTAGACCC
TGGCCGCTGCTACCGCGTCACCTGGTTCACCTCCTGGAGCCCCTGCTACGACTGTGCCCGACATGTGGCC
GACTTTCTGCGAGGGAACCCCAACCTCAGTCTGAGGATCTTCACCGCGCGCCTCTACTTCTGTGAGGACC
GCAAGGCTGAGCCCGAGGGGCTGCGGCGGCTGCACCGCGCCGGGGTGCAAATAGCCATCATGACCTTCAA
AGGTGCGAAAGGGCCTTCCGCGCAGGCGCAGTGCAGCAGCCCGCATTCGGGATTGCGATGCGGAATGAAT
GAGTTAGTGGGGAAGCTCGAGGGGAAGAAGTGGGCGGGGATTCTGGTTCACCTCTGGAGCCGAAATTAAA
GATTAGAAGCAGAGAAAAGAGTGAATGGCTCAGAGACAAGGCCCCGAGGAAATGAGAAAATGGGGCCAGG
GTTGCTTCTTTCCCCTCGATTTGGAACCTGAACTGTCTTCTACCCCCATATCCCCGCCTTTTTTTCCTTT
TTTTTTTTTTGAAGATTATTTTTACTGCTGGAATACTTTTGTAGAAAACCACGAAAGAACTTTCAAAGCC
TGGGAAGGGCTGCATGAAAATTCAGTTCGTCTCTCCAGACAGCTTCGGCGCATCCTTTTGGTAAGGGGCT
TCCTCGCTTTTTAAATTTTCTTTCTTTCTCTACAGTCTTTTTTGGAGTTTCGTATATTTCTTATATTTTC
TTATTGTTCAATCACTCTCAGTTTTCATCTGATGAAAACTTTATTTCTCCTCCACATCAGCTTTTTCTTC
TGCTGTTTCACCATTCAGAGCCCTCTGCTAAGGTTCCTTTTCCCTCCCTTTTCTTTCTTTTGTTGTTTCA
CATCTTTAAATTTCTGTCTCTCCCCAGGGTTGCGTTTCCTTCCTGGTCAGAATTCTTTTCTCCTTTTTTT
TTTTTTTTTTTTTTTTTTTTAAACAAACAAACAAAAAACCCAAAAAAACTCTTTCCCAATTTACTTTCTT
CCAACATGTTACAAAGCCATCCACTCAGTTTAGAAGACTCTCCGGCCCCACCGACCCCCAACCTCGTTTT
GAAGCCATTCACTCAATTTGCTTCTCTCTTTCTCTACAGCCCCTGTATGAGGTTGATGACTTACGAGACG
CATTTCGTACTTTGGGACTTTGATAGCAACTTCCAGGAATGTCACACACGATGAAATATCTCTGCTGAAG
ACAGTGGATAAAAAACAGTCCTTCAAGTCTTCTCTGTTTTTATTCTTCAACTCTCACTTTCTTAGAGTTT
ACAGAAAAAATATTTATATACGACTCTTTAAAAAGATCTATGTCTTGAAAATAGAGAAGGAACACAGGTC
TGGCCAGGGACGTGCTGCAATTGGTGCAGTTTTGAATGCAACATTGTCCCCTACTGGGAATAACAGAACT
GCAGGACCTGGGAGCATCCTAAAGTGTCAACGTTTTTCTATGACTTTTAGGTAGGATGAGAGCAGAAGGT
AGATCCTAAAAAGCATGGTGAGAGGATCAAATGTTTTTATATCAACATCCTTTATTATTTGATTCATTTG
AGTTAACAGTGGTGTTAGTGATAGATTTTTCTATTCTTTTCCCTTGACGTTTACTTTCAAGTAACACAAA
CTCTTCCATCAGGCCATGATCTATAGGACCTCCTAATGAGAGTATCTGGGTGATTGTGACCCCAAACCAT
CTCTCCAAAGCATTAATATCCAATCATGCGCTGTATGTTTTAATCAGCAGAAGCATGTTTTTATGTTTGT
ACAAAAGAAGATTGTTATGGGTGGGGATGGAGGTATAGACCATGCATGGTCACCTTCAAGCTACTTTAAT
AAAGGATCTTAAAATGGGCAGGAGGACTGTGAACAAGACACCCTAATAATGGGTTGATGTCTGAAGTAGC
AAATCTTCTGGAAACGCAAACTCTTTTAAGGAAGTCCCTAATTTAGAAACACCCACAAACTTCACATATC
ATAATTAGCAAACAATTGGAAGGAAGTTGCTTGAATGTTGGGGAGAGGAAAATCTATTGGCTCTCGTGGG
TCTCTTCATCTCAGAAATGCCAATCAGGTCAAGGTTTGCTACATTTTGTATGTGTGTGATGCTTCTCCCA
AAGGTATATTAACTATATAAGAGAGTTGTGACAAAACAGAATGATAAAGCTGCGAACCGTGGCACACGCT
CATAGTTCTAGCTGCTTGGGAGGTTGAGGAGGGAGGATGGCTTGAACACAGGTGTTCAAGGCCAGCCTGG
GCAACATAACAAGATCCTGTCTCTCAAAAAAAAAAAAAAAAAAAAGAAAGAGAGAGGGCCGGGCGTGGTG
GCTCACGCCTGTAATCCCAGCACTTTGGGAGGCCGAGCCGGGCGGATCACCTGTGGTCAGGAGTTTGAGA
CCAGCCTGGCCAACATGGCAAAACCCCGTCTGTACTCAAAATGCAAAAATTAGCCAGGCGTGGTAGCAGG
CACCTGTAATCCCAGCTACTTGGGAGGCTGAGGCAGGAGAATCGCTTGAACCCAGGAGGTGGAGGTTGCA
GTAAGCTGAGATCGTGCCGTTGCACTCCAGCCTGGGCGACAAGAGCAAGACTCTGTCTCAGAAAAAAAAA
AAAAAAAGAGAGAGAGAGAGAAAGAGAACAATATTTGGGAGAGAAGGATGGGGAAGCATTGCAAGGAAAT
TGTGCTTTATCCAACAAAATGTAAGGAGCCAATAAGGGATCCCTATTTGTCTCTTTTGGTGTCTATTTGT
CCCTAACAACTGTCTTTGACAGTGAGAAAAATATTCAGAATAACCATATCCCTGTGCCGTTATTACCTAG
CAACCCTTGCAATGAAGATGAGCAGATCCACAGGAAAACTTGAATGCACAACTGTCTTATTTTAATCTTA
TTGTACATAAGTTTGTAAAAGAGTTAAAAATTGTTACTTCATGTATTCATTTATATTTTATATTATTTTG
CGTCTAATGATTTTTTATTAACATGATTTCCTTTTCTGATATATTGAAATGGAGTCTCAAAGCTTCATAA
ATTTATAACTTTAGAAATGATTCTAATAACAACGTATGTAATTGTAACATTGCAGTAATGGTGCTACGAA
GCCATTTCTCTTGATTTTTAGTAAACTTTTATGACAGCAAATTTGCTTCTGGCTCACTTTCAATCAGTTA
AATAAATGATAAATAATTTTGGAAGCTGTGAAGATAAAATACCAAATAAAATAATATAAAAGTGATTTAT
ATGAAGTTAAAATAAAAAATCAGTATGATGGAATAAACTTG

[0311] Other exemplary deaminases that can be fused to Cas9 according to aspects of this disclosure are provided below. It should be understood that, in some embodiments, the active domain of the respective sequence can be used, e.g., the domain without a localizing signal (nuclear localization sequence, without nuclear export signal, cytoplasmic localizing signal).

Human AID:
(SEQ ID NO: 92)
[sequence omitted]
(underline: nuclear localization sequence; double underline: nuclear export signal)
Mouse AID:
(SEQ ID NO: 93)
MDSLLMKQKKFLYHFKNVRWAKGRHETYLCYVVKRRDSATSCSLDFGHLRNKSGCH
VELLFLRYISDWDLDPGRCYRVTWFTSWSPCYDCARHVAEFLRWNPNLSLRIFTARLYF
CEDRKAEPEGLRRLHRAGVQIGIMTFKDYFYCWNTFVENRERTFKAWEGLHENSVRLT
RQLRRTEEPLYEVDDLRDAFRMLGF
(underline: nuclear localization sequence; double underline: nuclear export signal)
Dog AID:
(SEQ ID NO: 94)
MDSLLMKQRKFLYHFKNVRWAKGRHETYLCYVVKRRDSATSFSLDFGHLRNKSGCHV
ELLFLRYISDWDLDPGRCYRVTWFTSWSPCYDCARHVADFLRGYPNLSLRIFAARLYFC
EDRKAEPEGLRRLHRAGVQIAIMTFKDYFYCWNTFVENREKTFKAWEGLHENSVRLSR
QLRRILLPLYEVDDLRDAFRTLGL
(underline: nuclear localization sequence; double underline: nuclear export signal)
Bovine AID:
(SEQ ID NO: 95)
MDSLLKKQRQFLYQFKNVRWAKGRHETYLCYVVKRRDSPTSFSLDFGHLRNKAGCHV
ELLFLRYISDWDLDPGRCYRVTWFTSWSPCYDCARHVADFLRGYPNLSLRIFTARLYFC
DKERKAEPEGLRRLHRAGVQIAIMTFKDYFYCWNTFVENHERTFKAWEGLHENSVRLS
RQLRRILLPLYEVDDLRDAFRTLGL
(underline: nuclear localization sequence; double underline: nuclear export signal)
Rat AID
(SEQ ID NO: 96)
MAVGSKPKAALVGPHWERERIWCFLCSTGLGTQQTGQTSRWLRPAATQDPVSPPRSLL
MKQRKFLYHFKNVRWAKGRHETYLCYVVKRRDSATSFSLDFGYLRNKSGCHVELLFL
RYISDWDLDPGRCYRVTWFTSWSPCYDCARHVADFLRGNPNLSLRIFTARLTGWGALP
AGEMSPARPSDYFYCWNTFVENHERTFKAWEGLHENSVRLSRRLRRILLPLYEVDDLR
DAFRTLGL
(underline: nuclear localization sequence; double underline: nuclear export signal)
Mouse APOBEC-3
(SEQ ID NO: 97)
MGPFCLGCSHRKCYSPIRNLISQETFKFHFKNLGYAKGRKDTFLCYEVTRKDCDSPVSL
HHGVFKNKDNIHAEICFLYWFHDKVLKVLSPREEFKITWYMSWSPCFECAEQIVRFLATHH
NLSLDIFSSRLYNVQDPETQQNLCRLVQEGAQVAAMDLYEFKKCWKKFVDNGGRRFR
PWKRLLTNFRYQDSKLQEILRPCYIPVPSSSSSTLSNICLTKGLPETRFCVEGRRMDPLSE
EEFYSQFYNQRVKHLCYYHRMKPYLCYQLEQFNGQAPLKGCLLSEKGKQHAEILFLDKI
RSMELSQVTITCYLTWSPCPNCAWQLAAFKRDRPDLILHIYTSRLYFHWKRPFQKGLCSL
WQSGILVDVMDLPQFTDCWTNFVNPKRPFWPWKGLEIISRRTQRRLRRIKESWGLQDL
VNDFGNLQLGPPMS
(italic: nucleic acid editing domain)
Rat APOBEC-3:
(SEQ ID NO: 98)
MGPFCLGCSHRKCYSPIRNLISQETFKFHFKNRLRYAIDRKDTFLCYEVTRKDCDSPVSL
HHGVFKNKDNIHAEICFLYWFHDKVLKVLSPREEFKITWYMSWSPCFECAEQVLRFLATH
HNLSLDIFSSRLYNIRDPENQQNLCRLVQEGAQVAAMDLYEFKKCWKKFVDNGGRRFR
PWKKLLTNFRYQDSKLQEILRPCYIPVPSSSSSTLSNICLTKGLPETRFCVERRRVHLLSE
EEFYSQFYNQRVKHLCYYHGVKPYLCYQLEQFNGQAPLKGCLLSEKGKQHAEILFLDKI
RSMELSQVIITCYLTWSPCPNCAWQLAAFKRDRPDLILHIYTSRLYFHWKRPFQKGLCSL
WQSGILVDVMDLPQFTDCWTNFVNPKRPFWPWKGLEIISRRTQRRLHRIKESWGLQDL
VNDFGNLQLGPPMS
(italic: nucleic acid editing domain)
Rhesus macaque APOBEC-3G:
(SEQ ID NO: 99)
MVEPMDPRTFVSNFNNRPILSGLNTVWLCCEVKTKDPSGPPLDAKIFQGKVYSKAKYH
PEMRFLRWFHKWRQLHHDQEYKVTWYVSWSPCTRCANSVATFLAKDPKVTLTIFVARLY
YFWKPDYQQALRILCQKRGGPHATMKIMNYNEFQDCWNKFVDGRGKPFKPRNNLPKH
YTLLQATLGELLRHLMDPGTFTSNFNNKPWVSGQHETYLCYKVERLHNDTWVPLNQH
RGFLRNQAPNIHGFPKGRHAELCFLDLIPFWKLDGQQYRVTCFTSWSPCFSCAQEMAKFIS
NNEHVSLCIFAARIYDDQGRYQEGLRALHRDGAKIAMMNYSEFEYCWDTFVDRQGRPF
QPWDGLDEHSQALSGRLRAI
(italic: nucleic acid editing domain; underline: cytoplasmic localization signal)
Chimpanzee APOBEC-3G:
(SEQ ID NO: 100)
MKPHFRNPVERMYQDTFSDNFYNRPILSHRNTVWLCYEVKTKGPSRPPLDAKIFRGQV
YSKLKYHPEMRFFHWFSKWRKLHRDQEYEVTWYISWSPCTKCTRDVATFLAEDPKVTLTI
FVARLYYFWDPDYQEALRSLCQKRDGPRATMKIMNYDEFQHCWSKFVYSQRELFEPW
NNLPKYYILLHIMLGEILRHSMDPPTFTSNFNNELWVRGRHETYLCYEVERLHNDTWVL
LNQRRGFLCNQAPHKHGFLEGRHAELCFLDVIPFWKLDLHQDYRVTCFTSWSPCFSCAQE
MAKFISNNKHVSLCIFAARIYDDQGRCQEGLRTLAKAGAKISIMTYSEFKHCWDTFVDH
QGCPFQPWDGLEEHSQALSGRLRAILQNQGN
(italic: nucleic acid editing domain; underline: cytoplasmic localization signal)
Green monkey APOBEC-3G:
(SEQ ID NO: 101)
MNPQIRNMVEQMEPDIFVYYFNNRPILSGRNTVWLCYEVKTKDPSGPPLDANIFQGKLY
PEAKDHPEMKFLHWFRKWRQLHRDQEYEVTWYVSWSPCTRCANSVAYFLAEDPKVTLTIF
VARLYYFWKPDYQQALRILCQERGGPHATMKIMNYNEFQHCWNEFVDGQGKPFKPRK
NLPKHYTLLHATLGELLRHVMDPGTFTSNFNNKPWVSGQRETYLCYKVERSHNDTWV
LLNQHRGFLRNQAPDRHGFPKGRHAELCFLDLIPFWKLDDQQYRVTCFTSWSPCFSCAQK
MAKFISNNKHVSLCIFAARIYDDQGRCQEGLRTLHRDGAKIAVMNYSEFEYCWDTFVD
RQGRPFQPWDGLDEHSQALSGRLRAI
(italic: nucleic acid editing domain; underline: cytoplasmic localization signal)
Human APOBEC-3G:
(SEQ ID NO: 102)
MKPHFRNTVERMYRDTFSYNFYNRPILSRRNTVWLCYEVKTKGPSRPPLDAKIFRGQV
YSELKYHPEMRFFHWFSKWRKLHRDQEYEVTWYISWSPCTKCFRDMAYFLAEDPKVTLTI
FVARLYYFWDPDYQEALRSLCQKRDGPRATMKIMNYDEFQHCWSKFVYSQRELFEPW
NNLPKYYILLHIMLGEILRHSMDPPTFTFNFNNEPWVRGRHETYLCYEVERMHNDTWV
EENQRRGFECNQAPGKHGFEEGRHAELCFLDVIPFWKLDLDQDYRVTCFTSWSPCFSCAQ
EMAKFISKNKHVSLCIFTARIYDDQGRCQEGLRTLAEAGAKISIMTYSEFKHCWDTFVD
HQGCPFOPWDGLDEHSQDLSGRLRAILQNQEN
(italic: nucleic acid editing domain; underline: cytoplasmic localization signal)
Human APOBEC-3F:
(SEQ ID NO: 103)
MKPHFRNTVERMYRDTFSYNFYNRPILSRRNTVWLCYEVKTKGPSRPRLDAKIFRGQV
YSQPEHHAEMCFLSWFCGNQLPAYKCFQITWFVSWTPCPDCVAKLAEFLAEHPNVTLTIS
AARLYYYWERDYRRALCRLSQAGARVKIMDDEEFAYCWENFVYSEGQPFMPWYKFD
DNYAFLHRTLKEILRNPMEAMYPHIFYFHFKNLRKAYGRNESWLCFTMEVVKHHSPVS
WKRGVFRNQVDPETHCHAERCFLSWFCDDILSPNTNYEVTWYTSWSPCPECAGEVAEF
LARHSNVNLTIFTARLYYFWDTDYQEGLRSLSQEGASVEIMGYKDFKYCWENFVYND
DEPFKPWKGLKYNFLFLDSKLQEILE
(italic: nucleic acid editing domain)
Human APOBEC-3B:
(SEQ ID NO: 104)
MNPQIRNPMERMYRDTFYDNFENEPILYGRSYTWLCYEVKIKRGRSNLLWDTGVFRGQ
VYFKPQYHAEMCFLSWFCGNQLPAYKCFQITWFVSWTPCPDCVAKLAEFLSEHPNVTLTI
SAARLYYYWERDYRRALCRLSQAGARVTIMDYEEFAYCWENFVYNEGQQFMPWYKF
DENYAFLHRTLKEILRYLMDPDTFTFNFNNDPLVLRRRQTYLCYEVERLDNGTWVLMD
QHMGFECNEARNEECGFYGRHAELRFLDLVPSLQLDPAQIYRVTWFLSWSPCFSWGCAGE
VRAFLQENTHVRLRIFAARIYDYDPLYKEALQMLRDAGAQVSIMTYDEFEYCWDTFVY
RQGCPFQPWDGLEEHSQALSGRLRAILQNQGN
(italic: nucleic acid editing domain)
Rat APOBEC-3B:
(SEQ ID NO: 105)
MQPQGLGPNAGMGPVCLGCSHRRPYSPIRNPLKKLYQQTFYFHFKNVRYAWGRKNNF
LCYEVNGMDCALPVPLRQGVFRKQGHIHAELCFIYWFHDKVLRVLSPMEEFKVTWYM
SWSPCSKCAEQVARFLAAHRNLSLAIFSSRLYYYLRNPNYQQKLCRLIQEGVHVAAMD
LPEFKKCWNKFVDNDGQPFRPWMRLRINFSFYDCKLQEIFSRMNLLREDVFYLQFNNS
HRVKPVQNRYYRRKSYLCYQLERANGQEPLKGYLLYKKGEQHVEILFLEKMRSMELS
QVRITCYLTWSPCPNCARQLAAFKKDHPDLILRIYTSRLYFWRKKFQKGLCTLWRSGIH
VDVMDLPQFADCWTNFVNPQRPFRPWNELEKNSWRIQRRLRRIKESWGL
Bovine APOBEC-3B:
(SEQ ID NO: 106)
DGWEVAFRSGTVLKAGVLGVSMTEGWAGSGHPGQGACVWTPGTRNTMNLLREVLFK
QQFGNQPRVPAPYYRRKTYLCYQLKQRNDLTLDRGCFRNKKQRHAERFIDKINSLDLN
PSQSYKIICYITWSPCPNCANELVNFITRNNHLKLEIFASRLYFHWIKSFKMGLQDLQNA
GISVAVMTHTEFEDCWEQFVDNQSRPFQPWDKLEQYSASIRRRLQRILTAPI
Chimpanzee APOBEC-3B:
(SEQ ID NO: 107)
MNPQIRNPMEWMYQRTFYYNFENEPILYGRSYTWLCYEVKIRRGHSNLLWDTGVFRG
QMYSQPEHHAEMCFLSWFCGNQLSAYKCFQITWFVSWTPCPDCVAKLAKFLAEHPNV
TLTISAARLYYYWERDYRRALCRLSQAGARVKIMDDEEFAYCWENFVYNEGQPFMPW
YKFDDNYAFLHRTLKEIIRHLMDPDTFTFNFNNDPLVLRRHQTYLCYEVERLDNGTWV
LMDQHMGFLCNEAKNLLCGFYGRHAELRFLDLVPSLQLDPAQIYRVTWFISWSPCFSW
GCAGQVRAFLQENTHVRLRIFAARIYDYDPLYKEALQMLRDAGAQVSIMTYDEFEYC
WDTFVYRQGCPFQPWDGLEEHSQALSGRLRAILQVRASSLCMVPHRPPPPPQSPGPCLP
LCSEPPLGSLLPTGRPAPSLPFLLTASFSFPPPASLPPLPSLSLSPGHLPVPSFHSLTSCSIQP
PCSSRIRETEGWASVSKEGRDLG
Human APOBEC-3C:
(SEQ ID NO: 108)
MNPQIRNPMKAMYPGTFYFQFKNLWEANDRNETWLCFTVEGIKRRSVVSWKTGVFRN
QVDSETHCHAERCFLSWFCDDILSPNTKYQVTWYTSWSPCPDCAGEVAEFLARHSNVNLT
IFTARLYYFQYPCYQEGLRSLSQEGVAVEIMDYEDFKYCWENFVYNDNEPFKPWKGLK
TNFRLLKRRLRESLQ
(italic: nucleic acid editing domain)
Gorilla APOBEC-3C
(SEQ ID NO: 109)
MNPQIRNPMKAMYPGTFYFQFKNLWEANDRNETWLCFTVEGIKRRSVVSWKTGVFRN
QVDSETHCHAERCFLSWECDDILSPNTNYOVTWYTSWSPCPECAGEVAEFLARHSNVNLTI
FTARLYYFQDTDYQEGLRSLSQEGVAVKIMDYKDFKYCWENFVYNDDEPFKPWKGLK
YNFRFLKRRLQEILE
Human APOBEC-3 A:
(SEQ ID NO: 110)
MEASPASGPRHLMDPHIFTSNFNNGIGRHKTYLCYEVERLDNGTSVKMDQHRGFLHNQ
AKNEECGFYGRHAELRFLDLVPSLQLDPAQIYRVTWFLSWSPCFSWGCAGEVRAFEQENY
HVRLRIFAARIYDYDPLYKEALQMLRDAGAQVSIMTYDEFKHCWDTFVDHQGCPFQP
WDGLDEHSQALSGRLRAILQNQGN
(italic: nucleic acid editing domain)
Rhesus macaque APOBEC-3A:
(SEQ ID NO: 111)
MDGSPASRPRHLMDPNTFTFNFNNDLSVRGRHQTYLCYEVERLDNGTWVPMDERRGF
LCNKAKNVPCGDYGCHVELRFLCEVPSWQLDPAQTYRVTWFISWSPCFRRGCAGQVRVF
LQENKHVRLRIFAARIYDYDPLYQEALRTLRDAGAQVSIMTYEEFKHCWDTFVDRQGR
PFQPWDGLDEHSQALSGRLRAILQNQGN
(italic: nucleic acid editing domain)
Bovine APOBEC-3A:
(SEQ ID NO: 112)
MDEYTFTENFNNQGWPSKTYLCYEMERLDGDATIPLDEYKGFVRNKGLDQPEKPCHAE
LYFLGKIHSWNLDRNQHYRLTCFISWSPCYDCAQKLTTFLKENHHISLHILASRIYTHNRFG
CHQSGLCELQAAGARITIMTFEDFKHCWETFVDHKGKPFQPWEGLNVKSQALCTELQA
ILKTQQN
(italic: nucleic acid editing domain
Human APOBEC-3H:
(SEQ ID NO: 113)
MALLTAETFRLQFNNKRRLRRPYYPRKALLCYQLTPQNGSTPTRGYFENKKKCHAEICF
INEIKSMGLDETQCYQVTCYLTWSPCSSCAWELVDFIKAHDHLNLGIFASRLYYHWCKPQ
QKGLRLLCGSQVPVEVMGFPKFADCWENFVDHEKPLSFNPYKMLEELDKNSRAIKRRL
ERIKIPGVRAQGRYMDILCDAEV
(italic: nucleic acid editing domain)
Rhesus macaque APOBEC-3H:
(SEQ ID NO: 114)
MALLTAKTFSLQFNNKRRVNKPYYPRKALLCYQLTPQNGSTPTRGHLKNKKKDHAEIR
FINKIKSMGLDETQCYQVTCYLTWSPCPSCAGELVDFIKAHRHLNLRIFASRLYYHWRP
NYQEGLLLLCGSQVPVEVMGLPEFTDCWENFVDHKEPPSFNPSEKLEELDKNSQAIKRR
LERIKSRSVDVLENGLRSLQLGPVTPSSSIRNSR
Human APOBEC-3D:
(SEQ ID NO: 115)
MNPQIRNPMERMYRDTFYDNFENEPILYGRSYTWLCYEVKIKRGRSNLLWDTGVFRGP
VLPKRQSNHRQEVYFRFENHAEMCFLSWFCGNRLPANRRFQITWFVSWNPCLPCVVKVT
KFLAEHPNVTLTISAARLYYYRDRDWRWVLLRLHKAGARVKIMDYEDFAYCWENFVC
NEGQPFMPWYKFDDNYASLHRTLKEILRNPMEAMYPHIFYFHFKNLLKACGRNESWLC
FTMEVTKHHSAVFRKRGVFRNQVDPETHCHAERCFLSWFCDDILSPNTNYEVTWYTSWSP
CPECAGEVAEFLARHSNVNLTIFTARLCYFWDTDYQEGLCSLSQEGASVKIMGYKDFV
SCWKNFVYSDDEPFKPWKGLQTNFRLLKRRLREILQ
(italic: nucleic acid editing domain)
Human APOBEC-1:
(SEQ ID NO: 116)
MTSEKGPSTGDPTLRRRIEPWEFDVFYDPRELRKEACLLYEIKWGMSRKIWRSSGKNTT
NHVEVNFIKKFTSERDFHPSMSCSITWFLSWSPCWECSQAIREFLSRHPGVTLVIYVARL
FWHMDQQNRQGLRDLVNSGVTIQIMRASEYYHCWRNFVNYPPGDEAHWPQYPPLWM
MLYALELHCIILSLPPCLKISRRWQNHLTFFRLHLQNCHYQTIPPHILLATGLIHPSVAWR
Mouse APOBEC-1:
(SEQ ID NO: 117)
MSSETGPVAVDPTLRRRIEPHEFEVFFDPRELRKETCLLYEINWGGRHSVWRHTSQNTS
NHVEVNFLEKFTTERYFRPNTRCSITWFLSWSPCGECSRAITEFLSRHPYVTLFIYIARLY
HHTDQRNRQGLRDLISSGVTIQIMTEQEYCYCWRNFVNYPPSNEAYWPRYPHLWVKLY
VLELYCIILGLPPCLKILRRKQPQLTFFTITLQTCHYQRIPPHLLWATGLK
Rat APOBEC-1:
(SEQ ID NO: 118)
[sequence omitted]
Human APOBEC-2:
(SEQ ID NO: 119)
MAQKEEAAVATEAASQNGEDLENLDDPEKLKELIELPPFEIVTGERLPANFFKFQFRNV
EYSSGRNKTFLCYVVEAQGKGGQVQASRGYLEDEHAAAHAEEAFFNTILPAFDPALRY
NVTWYVSSSPCAACADRIIKTLSKTKNLRLLILVGRLFMWEEPEIQAALKKLKEAGCKL
RIMKPQDFEYVWQNFVEQEEGESKAFQPWEDIQENFLYYEEKLADILK
Mouse APOBEC-2:
(SEQ ID NO: 120)
MAQKEEAAEAAAPASQNGDDLENLEDPEKLKELIDLPPFEIVTGVRLPVNFFKFQFRNV
EYSSGRNKTFLCYVVEVQSKGGQAQATQGYLEDEHAGAHAEEAFFNTILPAFDPALKY
NVTWYVSSSPCAACADRILKTLSKTKNLRLLILVSRLFMWEEPEVQAALKKLKEAGCK
LRIMKPQDFEYIWQNFVEQEEGESKAFEPWEDIQENFLYYEEKLADILK
Rat APOBEC-2:
(SEQ ID NO: 121)
MAQKEEAAEAAAPASQNGDDLENLEDPEKLKELIDLPPFEIVTGVRLPVNFFKFQFRNV
EYSSGRNKTFLCYVVEAQSKGGQVQATQGYLEDEHAGAHAEEAFFNTILPAFDPALKY
NVTWYVSSSPCAACADRILKTLSKTKNLRLLILVSRLFMWEEPEVQAALKKLKEAGCK
LRIMKPQDFEYLWQNFVEQEEGESKAFEPWEDIQENFLYYEEKLADILK
Bovine APOBEC-2:
(SEQ ID NO: 122)
MAQKEEAAAAAEPASQNGEEVENLEDPEKLKELIELPPFEIVTGERLPAHYFKFQFRNV
EYSSGRNKTFLCYVVEAQSKGGQVQASRGYLEDEHATNHAEEAFFNSIMPTFDPALRY
MVTWYVSSSPCAACADRIVKTLNKTKNLRLLILVGRLFMWEEPEIQAALRKLKEAGCR
LRIMKPQDFEYIWQNFVEQEEGESKAFEPWEDIQENFLYYEEKLADILK
Petromyzon marinus CDA1 (pmCDAl):
(SEQ ID NO: 123)
MTDAEYVRIHEKLDIYTFKKQFFNNKKSVSHRCYVLFELKRRGERRACFWGYAVNK
PQSGTERGIHAEIFSIRKVEEYLRDNPGQFTINWYSSWSPCADCAEKILEWYNQELRG
NGHTLKIWACKLYYEKNARNQIGLWNLRDNGVGLNVMVSEHYQCCRKIFIQSSHNQ
LNENRWLEKTLKRAEKRRSELSFMIQVKILHTTKSPAV
Human APOBEC3G D316R D317R
(SEQ ID NO: 124)
MKPHFRNTVERMYRDTFSYNFYNRPILSRRNTVWLCYEVKTKGPSRPPLDAKIFRGQ
VYSELKYHPEMRFFHWFSKWRKLHRDQEYEVTWYISWSPCTKCTRDMATFLAEDP
KVTLTIFVARLYYFWDPDYQEALRSLCQKRDGPRATMKFNYDEFQHCWSKFVYSQ
RELFEPWNNLPKYYILLHFMLGEILRHSMDPPTFTFNFNNEPWVRGRHETYLCYEVER
MHNDTWVLLNQRRGFLCNQAPHKHGFLEGRHAELCFLDVIPFWKLDLDQDYRVTC
FTSWSPCFSCAQEMAKFISKKHVSLCIFTARIYRRQGRCQEGLRTLAEAGAKISFT
YSEFKHCWDTFVDHQGCPFQPWDGLDEHSQDLSGRLRAILQNQEN
Human APOBEC3G chain A:
(SEQ ID NO: 125)
MDPPTFTFNFNNEPWWGRHETYLCYEVERMHNDTWVLLNQRRGFLCNQAPHKHG
FLEGRHAELCFLDVIPFWKLDLDQDYRVTCFTSWSPCFSCAQEMAKFISKNKHVSLCI
FTARIYDDQGRCQEGLRTLAEAGAKISFTYSEFKHCWDTFVDHQGCPFQPWDGLD
EHSQDLSGRLRAILQ
Human APOBEC3G chain A D120R D121R:
(SEQ ID NO: 126)
MDPPTFTFNFNNEPWVRGRHETYLCYEVERMHNDTWVLLNQRRGFLCNQAPHKHG
FLEGRHAELCFLDVIPFWKLDLDQDYRVTCFTSWSPCFSCAQEMAKFISKNKHVSLCI
FTARIYRRQGRCQEGLRTLAEAGAKISFMTYSEFKHCWDTFVDHQGCPFQPWDGLDE
HSQDLSGRLRAILQ

[0312] Some aspects of the present disclosure are based on the recognition that modulating the deaminase domain catalytic activity of any of the fusion proteins described herein, for example by making point mutations in the deaminase domain, affect the processivity of the fusion proteins (e.g., base editors). For example, mutations that reduce, but do not eliminate, the catalytic activity of a deaminase domain within a base editing fusion protein can make it less likely that the deaminase domain will catalyze the deamination of a residue adjacent to a target residue, thereby narrowing the deamination window. The ability to narrow the deamination window can prevent unwanted deamination of residues adjacent to specific target residues, which can decrease or prevent off-target effects.

[0313] For example, in some embodiments, an APOBEC deaminase incorporated into a base editor can comprise one or more mutations selected from the group consisting of H121X, H122X, R126X, R126X, R118X, W90X, W90X, and R132X of rAPOBEC1, or one or more corresponding mutations in another APOBEC deaminase, wherein X is any amino acid. In some embodiments, an APOBEC deaminase incorporated into a base editor can comprise one or more mutations selected from the group consisting of H121R, H122R, R126A, R126E, R118A, W90A, W90Y, and R132E of rAPOBEC1, or one or more corresponding mutations in another APOBEC deaminase.

[0314] In some embodiments, an APOBEC deaminase incorporated into a base editor can comprise one or more mutations selected from the group consisting of D316X, D317X, R320X, R320X, R313X, W285X, W285X, R326X of hAPOBEC3G, or one or more corresponding mutations in another APOBEC deaminase, wherein X is any amino acid. In some embodiments, any of the fusion proteins provided herein comprise an APOBEC deaminase comprising one or more mutations selected from the group consisting of D316R, D317R, R320A, R320E, R313A, W285A, W285Y, R326E of hAPOBEC3G, or one or more corresponding mutations in another APOBEC deaminase.

[0315] In some embodiments, an APOBEC deaminase incorporated into a base editor can comprise a H121R and a H122R mutation of rAPOBEC1, or one or more corresponding mutations in another APOBEC deaminase. In some embodiments an APOBEC deaminase incorporated into a base editor can comprise an APOBEC deaminase comprising a R126A mutation of rAPOBEC1, or one or more corresponding mutations in another APOBEC deaminase. In some embodiments, an APOBEC deaminase incorporated into a base editor can comprise an APOBEC deaminase comprising a R126E mutation of rAPOBEC1, or one or more corresponding mutations in another APOBEC deaminase. In some embodiments, an APOBEC deaminase incorporated into a base editor can comprise an APOBEC deaminase comprising a R118A mutation of rAPOBEC1, or one or more corresponding mutations in another APOBEC deaminase. In some embodiments, an APOBEC deaminase incorporated into a base editor can comprise an APOBEC deaminase comprising a W90A mutation of rAPOBEC1, or one or more corresponding mutations in another APOBEC deaminase. In some embodiments, an APOBEC deaminase incorporated into a base editor can comprise an APOBEC deaminase comprising a W90Y mutation of rAPOBEC1, or one or more corresponding mutations in another APOBEC deaminase. In some embodiments, an APOBEC deaminase incorporated into a base editor can comprise an APOBEC deaminase comprising a R132E mutation of rAPOBEC1, or one or more corresponding mutations in another APOBEC deaminase. In some embodiments an APOBEC deaminase incorporated into a base editor can comprise an APOBEC deaminase comprising a W90Y and a R126E mutation of rAPOBEC1, or one or more corresponding mutations in another APOBEC deaminase. In some embodiments, an APOBEC deaminase incorporated into a base editor can comprise an APOBEC deaminase comprising a R126E and a R132E mutation of rAPOBEC1, or one or more corresponding mutations in another APOBEC deaminase. In some embodiments, an APOBEC deaminase incorporated into a base editor can comprise an APOBEC deaminase comprising a W90Y and a R132E mutation of rAPOBEC1, or one or more corresponding mutations in another APOBEC deaminase. In some embodiments, an APOBEC deaminase incorporated into a base editor can comprise an APOBEC deaminase comprising a W90Y, R126E, and R132E mutation of rAPOBEC1, or one or more corresponding mutations in another APOBEC deaminase.

[0316] In some embodiments, an APOBEC deaminase incorporated into a base editor can comprise an APOBEC deaminase comprising a D316R and a D317R mutation of hAPOBEC3G, or one or more corresponding mutations in another APOBEC deaminase. In some embodiments, any of the fusion proteins provided herein comprise an APOBEC deaminase comprising a R320A mutation of hAPOBEC3G, or one or more corresponding mutations in another APOBEC deaminase. In some embodiments, an APOBEC deaminase incorporated into a base editor can comprise an APOBEC deaminase comprising a R320E mutation of hAPOBEC3G, or one or more corresponding mutations in another APOBEC deaminase. In some embodiments, an APOBEC deaminase incorporated into a base editor can comprise an APOBEC deaminase comprising a R313A mutation of hAPOBEC3G, or one or more corresponding mutations in another APOBEC deaminase. In some embodiments, an APOBEC deaminase incorporated into a base editor can comprise an APOBEC deaminase comprising a W285A mutation of hAPOBEC3G, or one or more corresponding mutations in another APOBEC deaminase. In some embodiments, an APOBEC deaminase incorporated into a base editor can comprise an APOBEC deaminase comprising a W285Y mutation of hAPOBEC3G, or one or more corresponding mutations in another APOBEC deaminase. In some embodiments, an APOBEC deaminase incorporated into a base editor can comprise an APOBEC deaminase comprising a R326E mutation of hAPOBEC3G, or one or more corresponding mutations in another APOBEC deaminase. In some embodiments, an APOBEC deaminase incorporated into a base editor can comprise an APOBEC deaminase comprising a W285Y and a R320E mutation of hAPOBEC3G, or one or more corresponding mutations in another APOBEC deaminase. In some embodiments, an APOBEC deaminase incorporated into a base editor can comprise an APOBEC deaminase comprising a R320E and a R326E mutation of hAPOBEC3G, or one or more corresponding mutations in another APOBEC deaminase. In some embodiments, an APOBEC deaminase incorporated into a base editor can comprise an APOBEC deaminase comprising a W285Y and a R326E mutation of hAPOBEC3G, or one or more corresponding mutations in another APOBEC deaminase. In some embodiments, an APOBEC deaminase incorporated into a base editor can comprise an APOBEC deaminase comprising a W285Y, R320E, and R326E mutation of hAPOBEC3G, or one or more corresponding mutations in another APOBEC deaminase.

[0317] A number of modified cytidine deaminases are commercially available, including, but not limited to, SaBE3, SaKKH-BE3, VQR-BE3, EQR-BE3, VRER-BE3, YE1-BE3, EE-BE3, YE2-BE3, and YEE-BE3, which are available from Addgene (plasmids 85169, 85170, 85171, 85172, 85173, 85174, 85175, 85176, 85177). In some embodiments, a deaminase incorporated into a base editor comprises all or a portion of an APOBEC1 deaminase.

[0318] Details of C to T nucleobase editing proteins are described in International PCT Application No. PCT/US2016/058344 (WO2017/070632) and Komor, A. C., et al., “Programmable editing of a target base in genomic DNA without double-stranded DNA cleavage” Nature 533, 420-424 (2016), the entire contents of which are hereby incorporated by reference.

### A to G Editing

[0319] In some embodiments, a base editor described herein can comprise a deaminase domain which includes an adenosine deaminase. Such an adenosine deaminase domain of a base editor can facilitate the editing of an adenine (A) nucleobase to a guanine (G) nucleobase by deaminating the A to form inosine (I), which exhibits base pairing properties of G. Adenosine deaminase is capable of deaminating (i.e., removing an amine group) adenine of a deoxyadenosine residue in deoxyribonucleic acid (DNA).

[0320] In some embodiments, the nucleobase editors provided herein can be made by fusing together one or more protein domains, thereby generating a fusion protein. In certain embodiments, the fusion proteins provided herein comprise one or more features that improve the base editing activity (e.g., efficiency, selectivity, and specificity) of the fusion proteins. For example, the fusion proteins provided herein can comprise a Cas9 domain that has reduced nuclease activity. In some embodiments, the fusion proteins provided herein can have a Cas9 domain that does not have nuclease activity (dCas9), or a Cas9 domain that cuts one strand of a duplexed DNA molecule, referred to as a Cas9 nickase (nCas9). Without wishing to be bound by any particular theory, the presence of the catalytic residue (e.g., H840) maintains the activity of the Cas9 to cleave the non-edited (e.g., non-deaminated) strand containing a T opposite the targeted A. Mutation of the catalytic residue (e.g., D10 to A10) of Cas9 prevents cleavage of the edited strand containing the targeted A residue. Such Cas9 variants are able to generate a single-strand DNA break (nick) at a specific location based on the gRNA-defined target sequence, leading to repair of the non-edited strand, ultimately resulting in a T to C change on the non-edited strand. In some embodiments, an A-to-G base editor further comprises an inhibitor of inosine base excision repair, for example, a uracil glycosylase inhibitor (UGI) domain or a catalytically inactive inosine specific nuclease. Without wishing to be bound by any particular theory, the UGI domain or catalytically inactive inosine specific nuclease can inhibit or prevent base excision repair of a deaminated adenosine residue (e.g., inosine), which can improve the activity or efficiency of the base editor.

[0321] A base editor comprising an adenosine deaminase can act on any polynucleotide, including DNA, RNA and DNA-RNA hybrids. In certain embodiments, a base editor comprising an adenosine deaminase can deaminate a target A of a polynucleotide comprising RNA. For example, the base editor can comprise an adenosine deaminase domain capable of deaminating a target A of an RNA polynucleotide and/or a DNA-RNA hybrid polynucleotide. In an embodiment, an adenosine deaminase incorporated into a base editor comprises all or a portion of adenosine deaminase acting on RNA (ADAR, e.g., ADAR1 or ADAR2). In another embodiment, an adenosine deaminase incorporated into a base editor comprises all or a portion of adenosine deaminase acting on tRNA (ADAT). A base editor comprising an adenosine deaminase domain can also be capable of deaminating an A nucleobase of a DNA polynucleotide. In an embodiment an adenosine deaminase domain of a base editor comprises all or a portion of an ADAT comprising one or more mutations which permit the ADAT to deaminate a target A in DNA. For example, the base editor can comprise all or a portion of an ADAT from Escherichia coli (EcTadA) comprising one or more of the following mutations: D108N, A106V, D147Y, E155V, L84F, H123Y, I157F, or a corresponding mutation in another adenosine deaminase.

[0322] The adenosine deaminase can be derived from any suitable organism (e.g., E. coli). In some embodiments, the adenine deaminase is a naturally-occurring adenosine deaminase that includes one or more mutations corresponding to any of the mutations provided herein (e.g., mutations in ecTadA). The corresponding residue in any homologous protein can be identified by e.g., sequence alignment and determination of homologous residues. The mutations in any naturally-occurring adenosine deaminase (e.g., having homology to ecTadA) that corresponds to any of the mutations described herein (e.g., any of the mutations identified in ecTadA) can be generated accordingly.

### TadA

[0323] In particular embodiments, the TadA is any one of the TadA described in PCT/US2017/045381 (WO2018/027078), which is incorporated herein by reference in its entirety.

[0324] In one embodiment, a fusion protein of the invention comprises a wild-type TadA linked to TadA7.10, which is linked to Cas9 nickase. In particular embodiments, the fusion proteins comprise a single TadA7.10 domain (e.g., provided as a monomer). In other embodiments, the ABE7.10 editor comprises TadA7.10 and TadA(wt), which are capable of forming heterodimers. The relevant sequences follow:

MSEVEFSHEYWMRHALTLAKRAWDEREVPVGAVLVHNNRVIGEGWNRPIGRHDPTA HAEIMALRQGGLVMQNYRLIDATLYVTLEPCVMCAGAMIHSRIGRVVFGARDAKTGA AGSLMDVLHHPGMNHRVEITEGILADECAALLSDFFRMRRQEIKAQKKAQSSTD (SEQ ID NO: 127), which is termed “the TadA reference sequence” or wild type TadA (TadA(wt)).

TadA7.10:
(SEQ ID NO: 128)
MSEVEFSHEYWMRHALTLAKRARDEREVPVGAVLVLNNRVIGEGWNRAIG
LHDPTAHAEIMALRQGGLVMQNYRLIDATLYVTFEPCVMCAGAMIHSRIG
RVVFGVRNAKTGAAGSLMDVLHYPGMNHRVEITEGILADECAALLCYFFR
MPRQVFNAQKKAQSSTD

[0325] In some embodiments, the adenosine deaminase comprises an amino acid sequence that is at least 60%, at least 65%, at least 70%, at least 75%, at least 80%, at least 85%, at least 90%, at least 95%, at least 96%, at least 97%, at least 98%, at least 99%, or at least 99.5% identical to any one of the amino acid sequences set forth in any of the adenosine deaminases provided herein. It should be appreciated that adenosine deaminases provided herein may include one or more mutations (e.g., any of the mutations provided herein). The disclosure provides any deaminase domains with a certain percent identity plus any of the mutations or combinations thereof described herein. In some embodiments, the adenosine deaminase comprises an amino acid sequence that has 1, 2, 3, 4, 5, 6, 7, 8, 9, 10, 11, 12, 13, 14, 15, 16, 17, 18, 19, 20, 21, 22, 21, 24, 25, 26, 27, 28, 29, 30, 31, 32, 33, 34, 35, 36, 37, 38, 39, 40, 41, 42, 43, 44, 45, 46, 47, 48, 49, 50, or more mutations compared to a reference sequence, or any of the adenosine deaminases provided herein. In some embodiments, the adenosine deaminase comprises an amino acid sequence that has at least 5, at least 10, at least 15, at least 20, at least 25, at least 30, at least 35, at least 40, at least 45, at least 50, at least 60, at least 70, at least 80, at least 90, at least 100, at least 110, at least 120, at least 130, at least 140, at least 150, at least 160, or at least 170 identical contiguous amino acid residues as compared to any one of the amino acid sequences known in the art or described herein.

[0326] In some embodiments the TadA deaminase is a full-length E. coli TadA deaminase. For example, in certain embodiments, the adenosine deaminase comprises the amino acid sequence:

(SEQ ID NO: 129)
MRRAFITGVFFLSEVEFSHEYWMRHALTLAKRAWDEREVPVGAVLVHNNR
VIGEGWNRPIGRHDPTAHAEIMALRQGGLVMQNYRLIDATLYVTLEPCVM
CAGAMIHSRIGRVVFGARDAKTGAAGSLMDVLHHPGMNHRVEITEGILAD
ECAALLSDFFRMRRQEIKAQKKAQSSTD.

[0327] It should be appreciated, however, that additional adenosine deaminases useful in the present application would be apparent to the skilled artisan and are within the scope of this disclosure. For example, the adenosine deaminase may be a homolog of adenosine deaminase acting on tRNA (ADAT). Without limitation, the amino acid sequences of exemplary AD AT homologs include the following:

Staphylococcus aureus TadA:
(SEQ ID NO: 130)
MGSHMTNDIYFMTLAIEEAKKAAQLGEVPIGAIITKDDEVIARAHNLRET
LQQPTAHAEHIAIERAAKVLGSWRLEGCTLYVTLEPCVMCAGTIVMSRIP
RVVYGADDPKGGCSGSLMNLLQQSNFNHRAIVDKGVLKEACSTLLTTFFK
NLRANKKSTN
Bacillus subtilis TadA:
(SEQ ID NO: 131)
MTQDELYMKEAIKEAKKAEEKGEVPIGAVLVINGEIIARAHNLRETEQRS
IAHAEMLVIDEACKALGTWRLEGATLYVTLEPCPMCAGAVVLSRVEKVVF
GAFDPKGGC SGTLMNLLQEERFNHQAEVVSGVLEEECGGMLSAFFRELR
KKKKAARKNLSE
Salmonella typhimurium (S. typhimurium) TadA:
(SEQ ID NO: 132)
MPPAFITGVTSLSDVELDHEYWMRHALTLAKRAWDEREVPVGAVLVHNHR
VIGEGWNRPIGRHDPTAHAEIMALRQGGLVLQNYRLLDTTLYVTLEPCVM
CAGAMVHSRIGRVVFGARDAKTGAAGSLIDVLHHPGMNHRVEIIEGVLRD
ECATLLSDFFRMRRQEIKALKKADRAEGAGPAV
Shewanella putrefaciens (S. putrefaciens) TadA:
(SEQ ID NO: 133)
MDEYWMQVAMQMAEKAEAAGEVPVGAVLVKDGQQIATGYNLSISQHDPTA
HAEILCLRSAGKKLENYRLLDATLYITLEPCAMCAGAMVHSRIARVVYGA
RDEKTGAAGTVVNLLQHPAFNHQVEVTSGVLAEACSAQLSRFFKRRRDEK
KALKLAQRAQQGIE
Haemophilus influenzae F3031 (H. influenzae) TadA:
(SEQ ID NO: 134)
MDAAKVRSEFDEKMMRYALELADKAEALGEIPVGAVLVDDARNIIGEGWN
LSIVQSDPTAHAEIIALRNGAKNIQNYRLLNSTLYVTLEPCTMCAGAILH
SRIKRLVFGASDYKTGAIGSRFHFFDDYKMNHTLEITSGVLAEECSQKLS
TFFQKRREEKKIEKALLKSLSDK
Caulobacter crescentus (C. crescentus) TadA:
(SEQ ID NO: 135)
MRTDESEDQDHRMMRLALDAARAAAEAGETPVGAVILDPSTGEVIATAGN
GPIAAHDPTAHAEIAAMRAAAAKLGNYRLTDLTLVVTLEPCAMCAGAISH
ARIGRVVFGADDPKGGAVVHGPKFFAQPTCHWRPEVTGGVLADESADLLR
GFFRARRKAKI
Geobacter sulfurreducens (G. sulfurreducens) TadA:
(SEQ ID NO: 136)
MSSLKKTPIRDDAYWMGKAIREAAKAAARDEVPIGAVIVRDGAVIGRGHN
LREGSNDPSAHAEMIAIRQAARRSANWRLTGATLYVTLEPCLMCMGAIIL
ARLERVVFGCYDPKGGAAGSLYDLSADPRLNHQVRLSPGVCQEECGTMLS
DFFRDLRRRKKAKATPALFIDERKVPPEP

[0328] An embodiment of E. Coli TadA (ecTadA) includes the following:

(SEQ ID NO: 137)
MSEVEFSHEYWMRHALTLAKRARDEREVPVGAVLVLNNRVIGEGWNRAIG
LHDPTAHAEIMALRQGGLVMQNYRLIDATLYVTFEPCVMCAGAMIHSRIG
RVVFGVRNAKTGAAGSLMDVLHYPGMNHRVEITEGILADECAALLCYFFR
MPRQVFNAQKKAQSSTD

[0329] In some embodiments, the adenosine deaminase is from a prokaryote. In some embodiments, the adenosine deaminase is from a bacterium. In some embodiments, the adenosine deaminase is from Escherichia coli, Staphylococcus aureus, Salmonella typhi, Shewanella putrefaciens, Haemophilus influenzae, Caulobacter crescentus, or Bacillus subtilis. In some embodiments, the adenosine deaminase is from E. coli.

[0330] In one embodiment, a fusion protein of the invention comprises a wild-type TadA linked to TadA7.10, which is linked to Cas9 nickase. In particular embodiments, the fusion proteins comprise a single TadA7.10 domain (e.g., provided as a monomer). In other embodiments, the ABE7.10 editor comprises TadA7.10 and TadA(wt), which are capable of forming heterodimers.

[0331] In some embodiments, the adenosine deaminase comprises an amino acid sequence that is at least 60%, at least 65%, at least 70%, at least 75%, at least 80%, at least 85%, at least 90%, at least 95%, at least 96%, at least 97%, at least 98%, at least 99%, or at least 99.5% identical to any one of the amino acid sequences set forth in any of the adenosine deaminases provided herein. It should be appreciated that adenosine deaminases provided herein may include one or more mutations (e.g., any of the mutations provided herein). The disclosure provides any deaminase domains with a certain percent identity plus any of the mutations or combinations thereof described herein. In some embodiments, the adenosine deaminase comprises an amino acid sequence that has 1, 2, 3, 4, 5, 6, 7, 8, 9, 10, 11, 12, 13, 14, 15, 16, 17, 18, 19, 20, 21, 22, 21, 24, 25, 26, 27, 28, 29, 30, 31, 32, 33, 34, 35, 36, 37, 38, 39, 40, 41, 42, 43, 44, 45, 46, 47, 48, 49, 50, or more mutations compared to a reference sequence, or any of the adenosine deaminases provided herein. In some embodiments, the adenosine deaminase comprises an amino acid sequence that has at least 5, at least 10, at least 15, at least 20, at least 25, at least 30, at least 35, at least 40, at least 45, at least 50, at least 60, at least 70, at least 80, at least 90, at least 100, at least 110, at least 120, at least 130, at least 140, at least 150, at least 160, or at least 170 identical contiguous amino acid residues as compared to any one of the amino acid sequences known in the art or described herein.

[0332] It should be appreciated that any of the mutations provided herein (e.g., based on the TadA reference sequence) can be introduced into other adenosine deaminases, such as E. coli TadA (ecTadA), S. aureus TadA (saTadA), or other adenosine deaminases (e.g., bacterial adenosine deaminases). It would be apparent to the skilled artisan that additional deaminases may similarly be aligned to identify homologous amino acid residues that can be mutated as provided herein. Thus, any of the mutations identified in the TadA reference sequence can be made in other adenosine deaminases (e.g. ecTada) that have homologous amino acid residues. It should also be appreciated that any of the mutations provided herein can be made individually or in any combination in the TadA reference sequence or another adenosine deaminase.

[0333] In some embodiments, the adenosine deaminase comprises a D108X mutation in the TadA reference sequence, or a corresponding mutation in another adenosine deaminase (e.g. ecTadA), where X indicates any amino acid other than the corresponding amino acid in the wild-type adenosine deaminase. In some embodiments, the adenosine deaminase comprises a D108G, D108N, D108V, D108A, or D108Y mutation, or a corresponding mutation in another adenosine deaminase.

[0334] In some embodiments, the adenosine deaminase comprises an A106X mutation in TadA reference sequence, or a corresponding mutation in another adenosine deaminase (e.g. ecTadA), where X indicates any amino acid other than the corresponding amino acid in the wild-type adenosine deaminase. In some embodiments, the adenosine deaminase comprises an A106V mutation in TadA reference sequence, or a corresponding mutation in another adenosine deaminase (e.g. wild type TadA or ecTadA).

[0335] In some embodiments, the adenosine deaminase comprises a E155X mutation in TadA reference sequence, or a corresponding mutation in another adenosine deaminase (e.g. ecTadA), where the presence of X indicates any amino acid other than the corresponding amino acid in the wild-type adenosine deaminase. In some embodiments, the adenosine deaminase comprises a E155D, E155G, or E155V mutation in TadA reference sequence, or a corresponding mutation in another adenosine deaminase (e.g. ecTadA).

[0336] In some embodiments, the adenosine deaminase comprises a D147X mutation in TadA reference sequence, or a corresponding mutation in another adenosine deaminase (e.g. ecTadA), where the presence of X indicates any amino acid other than the corresponding amino acid in the wild-type adenosine deaminase. In some embodiments, the adenosine deaminase comprises a D147Y, mutation in TadA reference sequence, or a corresponding mutation in another adenosine deaminase (e.g. ecTadA).

[0337] In some embodiments, the adenosine deaminase comprises an A106X, E155X, or D147X, mutation in the TadA reference sequence, or a corresponding mutation in another adenosine deaminase (e.g. ecTadA), where X indicates any amino acid other than the corresponding amino acid in the wild-type adenosine deaminase. In some embodiments, the adenosine deaminase comprises an E155D, E155G, or E155V mutation. In some embodiments, the adenosine deaminase comprises a D147Y.

[0338] For example, an adenosine deaminase can contain a D108N, a A106V, a E155V, and/or a D147Y mutation in TadA reference sequence, or a corresponding mutation in another adenosine deaminase (e.g. ecTadA). In some embodiments, an adenosine deaminase comprises the following group of mutations (groups of mutations are separated by a “;”) in TadA reference sequence, or corresponding mutations in another adenosine deaminase (e.g. ecTadA): D108N and A106V; D108N and E155V; D108N and D147Y; A106V and E155V; A106V and D147Y; E155V and D147Y; D108N, A106V, and E55V; D108N, A106V, and D147Y; D108N, E55V, and D147Y; A106V, E55V, and D 147Y; and D108N, A106V, E55V, and D147Y. It should be appreciated, however, that any combination of corresponding mutations provided herein can be made in an adenosine deaminase (e.g. ecTadA).

[0339] In some embodiments, the adenosine deaminase comprises one or more of a H8X, T17X, L18X, W23X, L34X, W45X, R51X, A56X, E59X, E85X, M94X, I95X, V102X, F104X, A106X, R107X, D108X, K110X, M118X, N127X, A138X, F149X, M151X, R153X, Q154X, I156X, and/or K157X mutation in TadA reference sequence, or one or more corresponding mutations in another adenosine deaminase (e.g. ecTadA), where the presence of X indicates any amino acid other than the corresponding amino acid in the wild-type adenosine deaminase. In some embodiments, the adenosine deaminase comprises one or more of H8Y, T17S, L18E, W23L, L34S, W45L, R51H, A56E, or A56S, E59G, E85K, or E85G, M94L, 1951, V102A, F104L, A106V, R107C, or R107H, or R107P, D108G, or D108N, or D108V, or D108A, or D108Y, K110I, M118K, N127S, A138V, F149Y, M151V, R153C, Q154L, I156D, and/or K157R mutation in TadA reference sequence, or one or more corresponding mutations in another adenosine deaminase (e.g. ecTadA).

[0340] In some embodiments, the adenosine deaminase comprises one or more of a H8X, D108X, and/or N127X mutation in TadA reference sequence, or one or more corresponding mutations in another adenosine deaminase (e.g. ecTadA), where X indicates the presence of any amino acid. In some embodiments, the adenosine deaminase comprises one or more of a H8Y, D108N, and/or N127S mutation in TadA reference sequence, or one or more corresponding mutations in another adenosine deaminase (e.g. ecTadA).

[0341] In some embodiments, the adenosine deaminase comprises one or more of H8X, R26X, M61X, L68X, M70X, A106X, D108X, A109X, N127X, D147X, R152X, Q154X, E155X, K161X, Q163X, and/or T166X mutation in TadA reference sequence, or one or more corresponding mutations in another adenosine deaminase (e.g. ecTadA), where X indicates the presence of any amino acid other than the corresponding amino acid in the wild-type adenosine deaminase. In some embodiments, the adenosine deaminase comprises one or more of H8Y, R26W, M611, L68Q, M70V, A106T, D108N, A109T, N127S, D147Y, R152C, Q154H or Q154R, E155G or E155V or E155D, K161Q, Q163H, and/or T166P mutation in TadA reference sequence, or one or more corresponding mutations in another adenosine deaminase (e.g. ecTadA).

[0342] In some embodiments, the adenosine deaminase comprises one, two, three, four, five, or six mutations selected from the group consisting of H8X, D108X, N127X, D147X, R152X, and Q154X in TadA reference sequence, or a corresponding mutation or mutations in another adenosine deaminase (e.g. ecTadA), where X indicates the presence of any amino acid other than the corresponding amino acid in the wild-type adenosine deaminase. In some embodiments, the adenosine deaminase comprises one, two, three, four, five, six, seven, or eight mutations selected from the group consisting of H8X, M61X, M70X, D108X, N127X, Q154X, E155X, and Q163X in TadA reference sequence, or a corresponding mutation or mutations in another adenosine deaminase (e.g. ecTadA), where X indicates the presence of any amino acid other than the corresponding amino acid in the wild-type adenosine deaminase. In some embodiments, the adenosine deaminase comprises one, two, three, four, or five, mutations selected from the group consisting of H8X, D108X, N127X, E155X, and T166X in TadA reference sequence, or a corresponding mutation or mutations in another adenosine deaminase (e.g. ecTadA), where X indicates the presence of any amino acid other than the corresponding amino acid in the wild-type adenosine deaminase.

[0343] In some embodiments, the adenosine deaminase comprises one, two, three, four, five, or six mutations selected from the group consisting of H8X, A106X, D108X, mutation or mutations in another adenosine deaminase, where X indicates the presence of any amino acid other than the corresponding amino acid in the wild-type adenosine deaminase. In some embodiments, the adenosine deaminase comprises one, two, three, four, five, six, seven, or eight mutations selected from the group consisting of H8X, R126X, L68X, D108X, N127X, D147X, and E155X, or a corresponding mutation or mutations in another adenosine deaminase, where X indicates the presence of any amino acid other than the corresponding amino acid in the wild-type adenosine deaminase. In some embodiments, the adenosine deaminase comprises one, two, three, four, or five, mutations selected from the group consisting of H8X, D108X, A109X, N127X, and E155X in TadA reference sequence, or a corresponding mutation or mutations in another adenosine deaminase (e.g. ecTadA), where X indicates the presence of any amino acid other than the corresponding amino acid in the wild-type adenosine deaminase.

[0344] In some embodiments, the adenosine deaminase comprises one, two, three, four, five, or six mutations selected from the group consisting of H8Y, D108N, N127S, D147Y, R152C, and Q154H in TadA reference sequence, or a corresponding mutation or mutations in another adenosine deaminase (e.g. ecTadA). In some embodiments, the adenosine deaminase comprises one, two, three, four, five, six, seven, or eight mutations selected from the group consisting of H8Y, M611, M70V, D108N, N127S, Q154R, E155G and Q163H in TadA reference sequence, or a corresponding mutation or mutations in another adenosine deaminase (e.g. ecTadA). In some embodiments, the adenosine deaminase comprises one, two, three, four, or five, mutations selected from the group consisting of H8Y, D108N, N127S, E155V, and T166P in TadA reference sequence, or a corresponding mutation or mutations in another adenosine deaminase (e.g. ecTadA). In some embodiments, the adenosine deaminase comprises one, two, three, four, five, or six mutations selected from the group consisting of H8Y, A106T, D108N, N127S, E155D, and K161Q in TadA reference sequence, or a corresponding mutation or mutations in another adenosine deaminase (e.g. ecTadA). In some embodiments, the adenosine deaminase comprises one, two, three, four, five, six, seven, or eight mutations selected from the group consisting of H8Y, R126W, L68Q, D108N, N127S, D147Y, and E155V in TadA reference sequence, or a corresponding mutation or mutations in another adenosine deaminase (e.g. ecTadA). In some embodiments, the adenosine deaminase comprises one, two, three, four, or five, mutations selected from the group consisting of H8Y, D108N, A109T, N127S, and E155G in TadA reference sequence, or a corresponding mutation or mutations in another adenosine deaminase (e.g. ecTadA).

[0345] Any of the mutations provided herein and any additional mutations (e.g., based on the ecTadA amino acid sequence) can be introduced into any other adenosine deaminases. Any of the mutations provided herein can be made individually or in any combination in TadA reference sequence or another adenosine deaminase (e.g. ecTadA).

[0346] Details of A to G nucleobase editing proteins are described in International PCT Application No. PCT/2017/045381 (WO2018/027078) and Gaudelli, N. M., et al., “Programmable base editing of A⋅T to G⋅C in genomic DNA without DNA cleavage” Nature, 551, 464-471 (2017), the entire contents of which are hereby incorporated by reference.

[0347] In some embodiments, the adenosine deaminase comprises one or more corresponding mutations in another adenosine deaminase (e.g. ecTadA). In some embodiments, the adenosine deaminase comprises a D108N, D108G, or D108V mutation in TadA reference sequence, or corresponding mutations in another adenosine deaminase (e.g. ecTadA). In some embodiments, the adenosine deaminase comprises a A106V and D108N mutation in TadA reference sequence, or corresponding mutations in another adenosine deaminase (e.g. ecTadA). In some embodiments, the adenosine deaminase comprises R107C and D108N mutations in TadA reference sequence, or corresponding mutations in another adenosine deaminase (e.g. ecTadA). In some embodiments, the adenosine deaminase comprises a H8Y, D108N, N127S, D147Y, and Q154H mutation in TadA reference sequence, or corresponding mutations in another adenosine deaminase (e.g. ecTadA). In some embodiments, the adenosine deaminase comprises a H8Y, R24W, D108N, N127S, D147Y, and E155V mutation in TadA reference sequence, or corresponding mutations in another adenosine deaminase (e.g. ecTadA). In some embodiments, the adenosine deaminase comprises a D108N, D147Y, and E155V mutation in TadA reference sequence, or corresponding mutations in another adenosine deaminase (e.g. ecTadA). In some embodiments, the adenosine deaminase comprises a H8Y, D108N, and N127S mutation in TadA reference sequence, or corresponding mutations in another adenosine deaminase (e.g. ecTadA). In some embodiments, the adenosine deaminase comprises a A106V, D108N, D147Y and E155V mutation in TadA reference sequence, or corresponding mutations in another adenosine deaminase (e.g. ecTadA).

[0348] In some embodiments, the adenosine deaminase comprises one or more of a, S2X, H8X, I49X, L84X, H123X, N127X, I156X and/or K160X mutation in TadA reference sequence, or one or more corresponding mutations in another adenosine deaminase, where the presence of X indicates any amino acid other than the corresponding amino acid in the wild-type adenosine deaminase. In some embodiments, the adenosine deaminase comprises one or more of S2A, H8Y, I49F, L84F, H123Y, N127S, I156F and/or K160S mutation in TadA reference sequence, or one or more corresponding mutations in another adenosine deaminase (e.g. ecTadA).

[0349] In some embodiments, the adenosine deaminase comprises an L84X mutation adenosine deaminase, where X indicates any amino acid other than the corresponding amino acid in the wild-type adenosine deaminase. In some embodiments, the adenosine deaminase comprises an L84F mutation in TadA reference sequence, or a corresponding mutation in another adenosine deaminase (e.g. ecTadA).

[0350] In some embodiments, the adenosine deaminase comprises an H123X mutation in TadA reference sequence, or a corresponding mutation in another adenosine deaminase (e.g. ecTadA), where X indicates any amino acid other than the corresponding amino acid in the wild-type adenosine deaminase. In some embodiments, the adenosine deaminase comprises an H123Y mutation in TadA reference sequence, or a corresponding mutation in another adenosine deaminase (e.g. ecTadA).

[0351] In some embodiments, the adenosine deaminase comprises an I157X mutation in TadA reference sequence, or a corresponding mutation in another adenosine deaminase (e.g. ecTadA), where X indicates any amino acid other than the corresponding amino acid in the wild-type adenosine deaminase. In some embodiments, the adenosine deaminase comprises an I157F mutation in TadA reference sequence, or a corresponding mutation in another adenosine deaminase (e.g. ecTadA).

[0352] In some embodiments, the adenosine deaminase comprises one, two, three, four, five, six, or seven mutations selected from the group consisting of L84X, A106X, D108X, H123X, D147X, E155X, and I156X in TadA reference sequence, or a corresponding mutation or mutations in another adenosine deaminase (e.g. ecTadA), where X indicates the presence of any amino acid other than the corresponding amino acid in the wild-type adenosine deaminase. In some embodiments, the adenosine deaminase comprises one, two, three, four, five, or six mutations selected from the group consisting of S2X, I49X, A106X, D108X, D147X, and E155X in TadA reference sequence, or a corresponding mutation or mutations in another adenosine deaminase (e.g. ecTadA), where X indicates the presence of any amino acid other than the corresponding amino acid in the wild-type adenosine deaminase. In some embodiments, the adenosine deaminase comprises one, two, three, four, or five, mutations selected from the group consisting of H8X, A106X, D108X, N127X, and K160X in TadA reference sequence, or a corresponding mutation or mutations in another adenosine deaminase (e.g. ecTadA), where X indicates the presence of any amino acid other than the corresponding amino acid in the wild-type adenosine deaminase.

[0353] In some embodiments, the adenosine deaminase comprises one, two, three, four, five, six, or seven mutations selected from the group consisting of L84F, A106V, D108N, H123Y, D147Y, E155V, and I156F in TadA reference sequence, or a corresponding mutation or mutations in another adenosine deaminase (e.g. ecTadA). In some embodiments, the adenosine deaminase comprises one, two, three, four, five, or six mutations selected from the group consisting of S2A, I49F, A106V, D108N, D147Y, and E155V in TadA reference sequence.

[0354] In some embodiments, the adenosine deaminase comprises one, two, three, four, or five, mutations selected from the group consisting of H8Y, A106T, D108N, N127S, and K160S in TadA reference sequence, or a corresponding mutation or mutations in another adenosine deaminase (e.g. ecTadA).

[0355] In some embodiments, the adenosine deaminase comprises one or more of a E25X, R26X, R107X, A142X, and/or A143X mutation in TadA reference sequence, or one or more corresponding mutations in another adenosine deaminase (e.g. ecTadA), where the presence of X indicates any amino acid other than the corresponding amino acid in the wild-type adenosine deaminase. In some embodiments, the adenosine deaminase comprises one or more of E25M, E25D, E25A, E25R, E25V, E25S, E25Y, R26G, R26N, R26Q, R26C, R26L, R26K, R107P, R07K, R107A, R107N, R107W, R107H, R107S, A142N, A142D, A142G, A143D, A143G, A143E, A143L, A143W, A143M, A143S, A143Q and/or A143R mutation in TadA reference sequence, or one or more corresponding mutations in another adenosine deaminase (e.g. ecTadA). In some embodiments, the adenosine deaminase comprises one or more of the mutations described herein corresponding to TadA reference sequence, or one or more corresponding mutations in another adenosine deaminase (e.g. ecTadA).

[0356] In some embodiments, the adenosine deaminase comprises an E25X mutation in TadA reference sequence, or a corresponding mutation in another adenosine deaminase (e.g. ecTadA), where X indicates any amino acid other than the corresponding amino acid in the wild-type adenosine deaminase. In some embodiments, the adenosine deaminase comprises an E25M, E25D, E25A, E25R, E25V, E25S, or E25Y mutation in TadA reference sequence, or a corresponding mutation in another adenosine deaminase (e.g. ecTadA).

[0357] In some embodiments, the adenosine deaminase comprises an R26X mutation in TadA reference sequence, or a corresponding mutation in another adenosine deaminase (e.g. ecTadA), where X indicates any amino acid other than the corresponding amino acid in the wild-type adenosine deaminase. In some embodiments, the adenosine deaminase comprises R26G, R26N, R26Q, R26C, R26L, or R26K mutation in TadA reference sequence, or a corresponding mutation in another adenosine deaminase (e.g. ecTadA).

[0358] In some embodiments, the adenosine deaminase comprises an R107X mutation in TadA reference sequence, or a corresponding mutation in another adenosine deaminase (e.g. ecTadA), where X indicates any amino acid other than the corresponding amino acid in the wild-type adenosine deaminase. In some embodiments, the adenosine deaminase comprises an R107P, R07K, R107A, R107N, R107W, R107H, or R107S mutation in TadA reference sequence, or a corresponding mutation in another adenosine deaminase (e.g. ecTadA).

[0359] In some embodiments, the adenosine deaminase comprises an A142X mutation in TadA reference sequence, or a corresponding mutation in another adenosine deaminase (e.g. ecTadA), where X indicates any amino acid other than the corresponding amino acid in the wild-type adenosine deaminase. In some embodiments, the adenosine deaminase comprises an A142N, A142D, A142G, mutation in TadA reference sequence, or a corresponding mutation in another adenosine deaminase (e.g. ecTadA).

[0360] In some embodiments, the adenosine deaminase comprises an A143X mutation in TadA reference sequence, or a corresponding mutation in another adenosine deaminase (e.g. ecTadA), where X indicates any amino acid other than the corresponding amino acid in the wild-type adenosine deaminase. In some embodiments, the adenosine deaminase comprises an A143D, A143G, A143E, A143L, A143W, A143M, A143S, A143Q and/or A143R mutation in TadA reference sequence, or a corresponding mutation in another adenosine deaminase (e.g. ecTadA).

[0361] In some embodiments, the adenosine deaminase comprises one or more of a H36X, N37X, P48X, I49X, R51X, M70X, N72X, D77X, E134X, S146X, Q154X, K157X, and/or K161X mutation in TadA reference sequence, or one or more corresponding mutations in another adenosine deaminase (e.g. ecTadA), where the presence of X indicates any amino acid other than the corresponding amino acid in the wild-type adenosine deaminase. In some embodiments, the adenosine deaminase comprises one or more of H36L, N37T, N37S, P48T, P48L, I49V, R51H, R51L, M70L, N72S, D77G, E134G, S146R, S146C, Q154H, K157N, and/or K161T mutation in TadA reference sequence, or one or more corresponding mutations in another adenosine deaminase (e.g. ecTadA).

[0362] In some embodiments, the adenosine deaminase comprises an H36X mutation in TadA reference sequence, or a corresponding mutation in another adenosine deaminase (e.g. ecTadA), where X indicates any amino acid other than the corresponding amino acid in the wild-type adenosine deaminase. In some embodiments, the adenosine deaminase comprises an H36L mutation in TadA reference sequence, or a corresponding mutation in another adenosine deaminase (e.g. ecTadA).

[0363] In some embodiments, the adenosine deaminase comprises an N37X mutation in TadA reference sequence, or a corresponding mutation in another adenosine deaminase (e.g. ecTadA), where X indicates any amino acid other than the corresponding amino acid in the wild-type adenosine deaminase. In some embodiments, the adenosine deaminase comprises an N37T, or N37S mutation in TadA reference sequence, or a corresponding mutation in another adenosine deaminase (e.g. ecTadA).

[0364] In some embodiments, the adenosine deaminase comprises an P48X mutation in TadA reference sequence, or a corresponding mutation in another adenosine deaminase (e.g. ecTadA), where X indicates any amino acid other than the corresponding amino acid in the wild-type adenosine deaminase. In some embodiments, the adenosine deaminase comprises an P48T, or P48L mutation in TadA reference sequence, or a corresponding mutation in another adenosine deaminase (e.g. ecTadA).

[0365] In some embodiments, the adenosine deaminase comprises an R51X mutation in TadA reference sequence, or a corresponding mutation in another adenosine deaminase, where X indicates any amino acid other than the corresponding amino acid in the wild-type adenosine deaminase. In some embodiments, the adenosine deaminase comprises an R51H, or R51L mutation in TadA reference sequence, or a corresponding mutation in another adenosine deaminase (e.g. ecTadA).

[0366] In some embodiments, the adenosine deaminase comprises an S146X mutation in TadA reference sequence, or a corresponding mutation in another adenosine deaminase (e.g. ecTadA), where X indicates any amino acid other than the corresponding amino acid in the wild-type adenosine deaminase. In some embodiments, the adenosine deaminase comprises an S146R, or S146C mutation in TadA reference sequence, or a corresponding mutation in another adenosine deaminase (e.g. ecTadA).

[0367] In some embodiments, the adenosine deaminase comprises an K157X mutation in TadA reference sequence, or a corresponding mutation in another adenosine deaminase (e.g. ecTadA), where X indicates any amino acid other than the corresponding amino acid in the wild-type adenosine deaminase. In some embodiments, the adenosine deaminase comprises a K157N mutation in TadA reference sequence, or a corresponding mutation in another adenosine deaminase (e.g. ecTadA).

[0368] In some embodiments, the adenosine deaminase comprises an P48X mutation in TadA reference sequence, or a corresponding mutation in another adenosine deaminase (e.g. ecTadA), where X indicates any amino acid other than the corresponding amino acid in the wild-type adenosine deaminase. In some embodiments, the adenosine deaminase comprises a P48S, P48T, or P48A mutation in TadA reference sequence, or a corresponding mutation in another adenosine deaminase (e.g. ecTadA).

[0369] In some embodiments, the adenosine deaminase comprises an A142X mutation in TadA reference sequence, or a corresponding mutation in another adenosine deaminase (e.g. ecTadA), where X indicates any amino acid other than the corresponding amino acid in the wild-type adenosine deaminase. In some embodiments, the adenosine deaminase comprises a A142N mutation in TadA reference sequence, or a corresponding mutation in another adenosine deaminase (e.g. ecTadA).

[0370] In some embodiments, the adenosine deaminase comprises an W23X mutation in TadA reference sequence, or a corresponding mutation in another adenosine deaminase (e.g. ecTadA), where X indicates any amino acid other than the corresponding amino acid in the wild-type adenosine deaminase. In some embodiments, the adenosine deaminase comprises a W23R, or W23L mutation in TadA reference sequence, or a corresponding mutation in another adenosine deaminase (e.g. ecTadA).

[0371] In some embodiments, the adenosine deaminase comprises an R152X mutation in TadA reference sequence, or a corresponding mutation in another adenosine deaminase (e.g. ecTadA), where X indicates any amino acid other than the corresponding amino acid in the wild-type adenosine deaminase. In some embodiments, the adenosine deaminase comprises a R152P, or R52H mutation in TadA reference sequence, or a corresponding mutation in another adenosine deaminase (e.g. ecTadA).

[0372] In one embodiment, the adenosine deaminase may comprise the mutations H36L, R51L, L84F, A106V, D108N, H123Y, S146C, D147Y, E155V, I156F, and K157N. In some embodiments, the adenosine deaminase comprises the following combination of mutations relative to TadA reference sequence, where each mutation of a combination is separated by a “_” and each combination of mutations is between parentheses:

### (A106V_D108N),

### (R107C_D108N),

### (H8Y_D108N_N127S_D147Y_Q154H),

### (H8Y_R24W_D108N_N127S_D147Y_E155V),

### (D108N_D147Y_E155V),

### (H8Y_D108N_N127S),

### (H8Y_D108N_N127S_D147Y_Q154H),

### (A106V_D108N_D147Y_E155V),

### (D108Q_D147Y_E155V),

### (D108M_D147Y_E155V),

### (D108L_D147Y_E155V),

### (D108K_D147Y_E155V),

### (D108I_D147Y_E155V),

### (D108F_D147Y_E155V),

### (A106V_D108N_D147Y),

### (A106V_D108M_D147Y_E155V),

### (E59A_A106V_D108N_D147Y_E155V),

[0373] (E59A cat dead_A106V_D108N_D147Y_E155V),

### (L84F_A106V_D108N_H123Y_D147Y_E155V_I156Y),

### (L84F_A106V_D108N_H123Y_D147Y_E155V_I156F),

### (D103A_D104N),

### (G22P_D103A_D104N),

### (G22P_D103A_D104N_S138 A),

### (D103A_D104N_S138A),

### (R26G_L84F_A106V_R107H_D108N_H123Y_A142N_A143D_D147Y_E155V_I156F),

### (E25G R26G_L84F_A106V_R107H_D108N_H123Y_A142N_A143D_D147Y_E155V_I156F),

### (E25D_R26G_L84F_A106V_R107K_D108N_H123Y_A142N_A143G_D147Y_E155V_I156F),

### (R26Q_L84F_A106V_D108N_H123Y_A142N_D147Y_E155V_I156F),

### (E25M R26G_L84F_A106V_R107P_D108N_H123Y_A142N_A143D_D147Y_E155V_I156F),

### (R26C_L84F_A106V_R107H_D108N_H123Y_A142N_D147Y_E155V_I156F),

### (L84F_A106V_D108N_H123Y_A142N_A143L_D147Y_E155V_I156F),

### (R26G_L84F_A106V_D108N_H123Y_A142N_D147Y_E155V_I156F),

### (E25A_R26G_L84F_A106V_R107N_D108N_H123Y_A142N_A143E_D147Y_E155V I156F),

### (R26G_L84F_A106V_R107H_D108N_H123Y_A142N_A143D_D147Y_E155V_I156F),

### (A106V_D108N_A142N_D147Y_E155V),

### (R26G_A106V_D108N_A142N_D147Y_E155V),

### (E25D_R26G_A106V_R107K_D108N_A142N_A143G_D147Y_E155V),

### (R26G_A106V_D108N_R107H_A142N_A143D_D147Y_E155V),

### (E25D_R26G_A106V_D108N_A142N_D147Y_E155V),

### (A106V_R107K_D108N_A142N_D147Y_E155V),

### (A106V_D108N_A142N_A143G_D147Y_E155V),

### (A106V_D108N_A142N_A143L_D147Y_E155V),

### (H36L_R51L_L84F_A106V_D108N_H123Y_S146C_D147Y_E155V_I156F_K157N),

### (N37T P48T_M70L_L84F_A106V_D108N_H123Y_D147Y_I49V_E155V_I156F),

### (N37S_L84F_A106V_D108N_H123Y_D147Y_E155V_I156F_K161T),

### (H36L_L84F_A106V_D108N_H123Y_D147Y_Q154H_E155V_I156F),

### (N72S_L84F_A106V_D108N_H123Y_S146R_D147Y_E155V_I156F),

### (H36L_P48L_L84F_A106V_D108N_H123Y_E134G_D147Y_E155V_I156F),

### (H36L_L84F_A106V_D108N_H123Y_D147Y_E155V_I156F_K157N),

### (H36L_L84F_A106V_D108N_H123Y_S146C_D147Y_E155V_I156F),

### (L84F_A106V_D108N_H123Y_S146R_D147Y_E155V_I156F_K161T),

### (N37S_R51H_D77G_L84F_A106V_D108N_H123Y_D147Y_E155V_I156F),

### (R51L_L84F_A106V_D108N_H123Y_D147Y_E155V_I156F_K157N),

### (D24G_Q71R_L84F_H96L_A106V_D108N_H123Y_D147Y_E155V_I156F_K160E),

### (H36L_G67V_L84F_A106V_D108N_H123Y_S146T_D147Y_E155V_I156F),

### (Q71L_L84F_A106V_D108N_H123Y_L137M_A143E_D147Y_E155V_I156F),

### (E25G_L84F_A106V_D108N_H123Y_D147Y_E155V_I156F_Q159L),

### (L84F_A91T_F104I_A106V_D108N_H123Y_D147Y_E155V_I156F),

### (N72D L84F_A106V_D108N_H123Y_G125A_D147Y_E155V_I156F),

### (P48S_L84F_S97C_A106V_D108N_H123Y_D147Y_E155V_I156F),

### (W23G_L84F_A106V_D108N_H123Y_D147Y_E155V_I156F),

### (D24G_P48L_Q71R_L84F_A106V_D108N_H123Y_D147Y_E155V_I156F_Q159L),

### (L84F_A106V_D108N_H123Y_A142N_D147Y_E155V_I156F),

### (H36L_R51L_L84F_A106V_D108N_H123Y_A142N_S146C_D147Y_E155V_I156F_K157N), (N37S_L84F_A106V_D108N_H123Y_A142N_D147Y_E155V_I156F_K161T),

### (L84F_A106V_D108N_D147Y_E155V_I156F),

### (R51L_L84F_A106V_D108N_H123Y_S146C_D147Y_E155V_I156F_K157N K161T),

### (L84F_A106V_D108N_H123Y_S146C_D147Y_E155V_I156F_K161T),

### (L84F_A106V_D108N_H123Y_S146C_D147Y_E155V_I156F_K157N K160E K161T),

### (L84F_A106V_D108N_H123Y_S146C_D147Y_E155V_I156F_K157N K160E),

### (R74Q_L84F_A106V_D108N_H123Y_D147Y_E155V_I156F),

### (R74A_L84F_A106V_D108N_H123Y_D147Y_E155V_I156F),

### (L84F_A106V_D108N_H123Y_D147Y_E155V_I156F),

### (R74Q_L84F_A106V_D108N_H123Y_D147Y_E155V_I156F),

### (L84F_R98Q_A106V_D108N_H123Y_D147Y_E155V_I156F),

### (L84F_A106V_D108N_H123Y_R129Q_D147Y_E155V_I156F),

### (P48S_L84F_A106V_D108N_H123Y_A142N_D147Y_E155V_I156F), (P48S_A142N),

### (P48T_I49V_L84F_A106V_D108N_H123Y_A142N_D147Y_E155V_I156F_L157N), (P48T_I49V_A142N),

### (H36L_P48S_R51L_L84F_A106V_D108N_H123Y_S146C_D147Y_E155V_I156F_K157N),

### (H36L_P48S_R51L_L84F_A106V_D108N_H123Y_S146C_A142N_D147Y_E155V_I156F

### (H36L_P48T_I49V_R51L_L84F_A106V_D108N_H123Y_S146C_D147Y_E155V_I156F_K157N),

### (H36L_P48T_I49V_R51L_L84F_A106V_D108N_H123Y_A142N_S146C_D147Y_E155V_I156F_K157N),

### (H36L_P48A_R51L_L84F_A106V_D108N_H123Y_S146C_D147Y_E155V_I156F_K157N),

### (H36L_P48A_R51L_L84F_A106V_D108N_H123Y_A142N_S146C_D147Y_E155V_I156F_K157N),

### (H36L_P48A_R51L_L84F_A106V_D108N_H123Y_S146C_A142N_D147Y_E155V_I156F_K157N),

### (W23L_H36L_P48A_R51L_L84F_A106V_D108N_H123Y_S146C_D147Y_E155V_I156F_K157N),

### (W23R_H36L_P48A_R51L_L84F_A106V_D108N_H123Y_S146C_D147Y_E155V_I156F_K157N),

### (W23L_H36L_P48A_R51L_L84F_A106V_D108N_H123Y_S146R_D147Y_E155V_I156F_K161T),

### (H36L_P48A_R51L_L84F_A106V_D108N_H123Y_S146C_D147Y_R152H_E155V_I156F_K157N),

### (H36L_P48A_R51L_L84F_A106V_D108N_H123Y_S146C_D147Y_R152P_E155V_I156F_K157N),

### (W23L_H36L_P48A_R51L_L84F_A106V_D108N_H123Y_S146C_D147Y_R152P_E155V_I156F_K157N),

### (W23L_H36L_P48A_R51L_L84F_A106V_D108N_H123Y_A142A S146C_D147Y_E155V I156F_K157N),

### (W23L_H36L_P48A_R51L_L84F_A106V_D108N_H123Y_A142A S146C_D147Y_R152P_E155V_I156F_K157N),

### (W23L_H36L_P48A_R51L_L84F_A106V_D108N_H123Y_S146R_D147Y_E155V_I156F_K161T),

### (W23R_H36L_P48A_R51L_L84F_A106V_D108N_H123Y_S146C_D147Y_R152P_E155V I156F_K157N),

### (H36L_P48A_R51L_L84F_A106V_D108N_H123Y_A142N_S146C_D147Y_R152P_E155V I156F_K157N).

[0374] In certain embodiments, the fusion proteins provided herein comprise one or more features that improve the base editing activity of the fusion proteins. For example, any of the fusion proteins provided herein may comprise a Cas9 domain that has reduced nuclease activity. In some embodiments, any of the fusion proteins provided herein may have a Cas9 domain that does not have nuclease activity (dCas9), or a Cas9 domain that cuts one strand of a duplexed DNA molecule, referred to as a Cas9 nickase (nCas9).

### Cytidine Deaminase

[0375] In one embodiment, a fusion protein of the invention comprises a cytidine deaminase. In some embodiments, the cytidine deaminases provided herein are capable of deaminating cytosine or 5-methylcytosine to uracil or thymine. In some embodiments, the cytosine deaminases provided herein are capable of deaminating cytosine in DNA. The cytidine deaminase may be derived from any suitable organism. In some embodiments, the cytidine deaminase is a naturally-occurring cytidine deaminase that includes one or more mutations corresponding to any of the mutations provided herein. One of skill in the art will be able to identify the corresponding residue in any homologous protein, e.g., by sequence alignment and determination of homologous residues. Accordingly, one of skill in the art would be able to generate mutations in any naturally-occurring cytidine deaminase that corresponds to any of the mutations described herein. In some embodiments, the cytidine deaminase is from a prokaryote. In some embodiments, the cytidine deaminase is from a bacterium. In some embodiments, the cytidine deaminase is from a mammal (e.g., human).

[0376] In some embodiments, the cytidine deaminase comprises an amino acid sequence that is at least 60%, at least 65%, at least 70%, at least 75%, at least 80%, at least 85%, at least 90%, at least 95%, at least 96%, at least 97%, at least 98%, at least 99%, or at least 99.5% identical to any one of the cytidine deaminase amino acid sequences set forth herein. It should be appreciated that cytidine deaminases provided herein may include one or more mutations (e.g., any of the mutations provided herein). The disclosure provides any deaminase domains with a certain percent identity plus any of the mutations or combinations thereof described herein. In some embodiments, the cytidine deaminase comprises an amino acid sequence that has 1, 2, 3, 4, 5, 6, 7, 8, 9, 10, 11, 12, 13, 14, 15, 16, 17, 18, 19, 20, 21, 22, 21, 24, 25, 26, 27, 28, 29, 30, 31, 32, 33, 34, 35, 36, 37, 38, 39, 40, 41, 42, 43, 44, 45, 46, 47, 48, 49, 50, or more mutations compared to a reference sequence, or any of the cytidine deaminases provided herein. In some embodiments, the cytidine deaminase comprises an amino acid sequence that has at least 5, at least 10, at least 15, at least 20, at least 25, at least 30, at least 35, at least 40, at least 45, at least 50, at least 60, at least 70, at least 80, at least 90, at least 100, at least 110, at least 120, at least 130, at least 140, at least 150, at least 160, or at least 170 identical contiguous amino acid residues as compared to any one of the amino acid sequences known in the art or described herein.

[0377] A fusion protein of the invention comprises a nucleic acid editing domain. In some embodiments, the nucleic acid editing domain can catalyze a C to U base change. In some embodiments, the nucleic acid editing domain is a deaminase domain. In some embodiments, the deaminase is a cytidine deaminase or an adenosine deaminase. In some embodiments, the deaminase is an apolipoprotein B mRNA-editing complex (APOBEC) family deaminase. In some embodiments, the deaminase is an APOBEC1 deaminase. In some embodiments, the deaminase is an APOBEC2 deaminase. In some embodiments, the deaminase is an APOBEC3 deaminase. In some embodiments, the deaminase is an APOBEC3 A deaminase. In some embodiments, the deaminase is an APOBEC3B deaminase. In some embodiments, the deaminase is an APOBEC3C deaminase. In some embodiments, the deaminase is an APOBEC3D deaminase. In some embodiments, the deaminase is an APOBEC3E deaminase. In some embodiments, the deaminase is an APOBEC3F deaminase. In some embodiments, the deaminase is an APOBEC3G deaminase. In some embodiments, the deaminase is an APOBEC3H deaminase. In some embodiments, the deaminase is an APOBEC4 deaminase. In some embodiments, the deaminase is an activation-induced deaminase (AID). In some embodiments, the deaminase is a vertebrate deaminase. In some embodiments, the deaminase is an invertebrate deaminase. In some embodiments, the deaminase is a human, chimpanzee, gorilla, monkey, cow, dog, rat, or mouse deaminase. In some embodiments, the deaminase is a human deaminase. In some embodiments, the deaminase is a rat deaminase, e.g., rAPOBEC1. In some embodiments, the deaminase is a Petromyzon marinus cytidine deaminase 1 (pmCDA1). In some embodiments, the deaminase is a human APOBEC3G. In some embodiments, the deaminase is a fragment of the human APOBEC3G. In some embodiments, the deaminase is a human APOBEC3G variant comprising a D316R D317R mutation. In some embodiments, the deaminase is a fragment of the human APOBEC3G and comprising mutations corresponding to the D316R D317R mutations. In some embodiments, the nucleic acid editing domain is at least 80%, at least 85%, at least 90%, at least 92%, at least 95%, at least 96%, at least 97%, at least 98%, at least 99%), or at least 99.5% identical to the deaminase domain of any deaminase described herein.

Cas9 Domains with Reduced Exclusivity

[0378] Typically, Cas9 proteins, such as Cas9 from S. pyogenes (spCas9), require a canonical NGG PAM sequence to bind a particular nucleic acid region, where the “N” in “NGG” is adenosine (A), thymidine (T), or cytosine (C), and the G is guanosine. This may limit the ability to edit desired bases within a genome. In some embodiments, the base editing fusion proteins provided herein may need to be placed at a precise location, for example a region comprising a target base that is upstream of the PAM. See e.g., Komor, A. C., et al., “Programmable editing of a target base in genomic DNA without double-stranded DNA cleavage” Nature 533, 420-424 (2016), the entire contents of which are hereby incorporated by reference. Accordingly, in some embodiments, any of the fusion proteins provided herein may contain a Cas9 domain that is capable of binding a nucleotide sequence that does not contain a canonical (e.g., NGG) PAM sequence. Cas9 domains that bind to non-canonical PAM sequences have been described in the art and would be apparent to the skilled artisan. For example, Cas9 domains that bind non-canonical PAM sequences have been described in Kleinstiver, B. P., et al., “Engineered CRISPR-Cas9 nucleases with altered PAM specificities” Nature 523, 481-485 (2015); and Kleinstiver, B. P., et al., “Broadening the targeting range of Staphylococcus aureus CRISPR-Cas9 by modifying PAM recognition” Nature Biotechnology 33, 1293-1298 (2015); Nishimasu, H., et al., “Engineered CRISPR-Cas9 nuclease with expanded targeting space” Science. 2018 Sep. 21; 361(6408):1259-1262, Chatterjee, P., et al., Minimal PAM specificity of a highly similar SpCas9 ortholog” Sci Adv. 2018 Oct. 24; 4(10):eaau0766. doi: 10.1126/sciadv.aau0766, the entire contents of each are hereby incorporated by reference. Several PAM variants are described in Table 1 below. Several non-limiting examples of PAM variants are described at Table 1 below:

TABLE 1
Cas9 proteins and corresponding PAM sequences

| Variant | PAM |
|---|---|
| spCas9 | NGG |
| spCas9-VRQR | NGA |
| spCas9-VRER | NGCG |
| xCas9 (sp) | NGN |
| saCas9 | NNGRRT |
| saCas9-KKH | NNNRRT |
| spCas9-MQKSER | NGCG |
| spCas9-MQKSER | NGCN |
| spCas9-LRKIQK | NGTN |
| spCas9-LRVSQK | NGTN |
| spCas9-LRVSQL | NGTN |
| SpyMacCas9 | NAA |
| Cpfl | 5′ (TTTV) |

Cas9 Complexes with Guide RNAs

[0379] Some aspects of this disclosure provide complexes comprising any of the fusion proteins provided herein, and a guide RNA (e.g., a guide that targets SERPINA1). In some embodiments, the guide nucleic acid (e.g., guide RNA) is from 15-100 nucleotides long and comprises a sequence of at least 10 contiguous nucleotides that is complementary to a target sequence. In some embodiments, the guide RNA is 15, 16, 17, 18, 19, 20, 21, 22, 23, 24, 25, 26, 27, 28, 29, 30, 31, 32, 33, 34, 35, 36, 37, 38, 39, 40, 41, 42, 43, 44, 45, 46, 47, 48, 49, or 50 nucleotides long. In some embodiments, the guide RNA comprises a sequence of 15, 16, 17, 18, 19, 20, 21, 22, 23, 24, 25, 26, 27, 28, 29, 30, 31, 32, 33, 34, 35, 36, 37, 38, 39, or 40 contiguous nucleotides that is complementary to a target sequence. In some embodiments, the target sequence is a DNA sequence. In some embodiments, the target sequence is a sequence in the genome of a bacteria, yeast, fungi, insect, plant, or animal. In some embodiments, the target sequence is a sequence in the genome of a human. In some embodiments, the 3′ end of the target sequence is immediately adjacent to a canonical PAM sequence (NGG). In some embodiments, the 3′ end of the target sequence is immediately adjacent to a non-canonical PAM sequence (e.g., a sequence listed in Table 1 or 5′-NAA-3′). In some embodiments, the guide nucleic acid (e.g., guide RNA) is complementary to a sequence in a gene of interest (e.g. SERPINA1).

[0380] Some aspects of this disclosure provide methods of using the fusion proteins, or complexes provided herein. For example, some aspects of this disclosure provide methods comprising contacting a DNA molecule with any of the fusion proteins provided herein, and with at least one guide RNA, wherein the guide RNA is about 15-100 nucleotides long and comprises a sequence of at least 10 contiguous nucleotides that is complementary to a target sequence. In some embodiments, the 3′ end of the target sequence is immediately adjacent to an AGC, GAG, TTT, GTG, or CAA sequence. In some embodiments, the 3′ end of the target sequence is immediately adjacent to an NGA, NGCG, NGN, NNGRRT, NNNRRT, NGCG, NGCN, NGTN, NGTN, NGTN, or 5′ (TTTV) sequence.

[0381] It will be understood that the numbering of the specific positions or residues in the respective sequences depends on the particular protein and numbering scheme used. Numbering might be different, e.g., in precursors of a mature protein and the mature protein itself, and differences in sequences from species to species may affect numbering. One of skill in the art will be able to identify the respective residue in any homologous protein and in the respective encoding nucleic acid by methods well known in the art, e.g., by sequence alignment and determination of homologous residues.

[0382] It will be apparent to those of skill in the art that in order to target any of the fusion proteins disclosed herein, to a target site, e.g., a site comprising a mutation to be edited, it is typically necessary to co-express the fusion protein together with a guide RNA. As explained in more detail elsewhere herein, a guide RNA typically comprises a tracrRNA framework allowing for Cas9 binding, and a guide sequence, which confers sequence specificity to the Cas9:nucleic acid editing enzyme/domain fusion protein. Alternatively, the guide RNA and tracrRNA may be provided separately, as two nucleic acid molecules. In some embodiments, the guide RNA comprises a structure, wherein the guide sequence comprises a sequence that is complementary to the target sequence. The guide sequence is typically 20 nucleotides long. The sequences of suitable guide RNAs for targeting Cas9:nucleic acid editing enzyme/domain fusion proteins to specific genomic target sites will be apparent to those of skill in the art based on the instant disclosure. Such suitable guide RNA sequences typically comprise guide sequences that are complementary to a nucleic sequence within 50 nucleotides upstream or downstream of the target nucleotide to be edited. Some exemplary guide RNA sequences suitable for targeting any of the provided fusion proteins to specific target sequences are provided herein.

### Additional Domains

[0383] A base editor described herein can include any domain which helps to facilitate the nucleobase editing, modification or altering of a nucleobase of a polynucleotide. In some embodiments, a base editor comprises a polynucleotide programmable nucleotide binding domain (e.g., Cas9), a nucleobase editing domain (e.g., deaminase domain), and one or more additional domains. In some cases, the additional domain can facilitate enzymatic or catalytic functions of the base editor, binding functions of the base editor, or be inhibitors of cellular machinery (e.g., enzymes) that could interfere with the desired base editing result. In some embodiments, a base editor can comprise a nuclease, a nickase, a recombinase, a deaminase, a methyltransferase, a methylase, an acetylase, an acetyltransferase, a transcriptional activator, or a transcriptional repressor domain.

[0384] In some embodiments, a base editor can comprise a uracil glycosylase inhibitor (UGI) domain. A UGI domain can for example improve the efficiency of base editors comprising a cytidine deaminase domain by inhibiting the conversion of a U formed by deamination of a C back to the C nucleobase. In some cases, cellular DNA repair response to the presence of U:G heteroduplex DNA can be responsible for a decrease in nucleobase editing efficiency in cells. In such cases, uracil DNA glyocosylase (UDG) can catalyze removal of U from DNA in cells, which can initiate base excision repair (BER), mostly resulting in reversion of the U:G pair to a C:G pair. In such cases, BER can be inhibited in base editors comprising one or more domains that bind the single strand, block the edited base, inhibit UGI, inhibit BER, protect the edited base, and/or promote repairing of the non-edited strand. Thus, this disclosure contemplates a base editor fusion protein comprising a UGI domain.

[0385] In some embodiments, a base editor comprises as a domain all or a portion of a double-strand break (DSB) binding protein. For example, a DSB binding protein can include a Gam protein of bacteriophage Mu that can bind to the ends of DSBs and can protect them from degradation. See Komor, A. C., et al., “Improved base excision repair inhibition and bacteriophage Mu Gam protein yields C:G-to-T:A base editors with higher efficiency and product purity” Science Advances 3:eaao4774 (2017), the entire content of which is hereby incorporated by reference.

[0386] In some embodiments, a base editor can comprise as a domain all or a portion of a nucleic acid polymerase (NAP). For example, a base editor can comprise all or a portion of a eukaryotic NAP. In some embodiments, a NAP or portion thereof incorporated into a base editor is a DNA polymerase. In some embodiments, a NAP or portion thereof incorporated into a base editor has translesion polymerase activity. In some cases, a NAP or portion thereof incorporated into a base editor is a translesion DNA polymerase. In some embodiments, a NAP or portion thereof incorporated into a base editor is a Rev7, Rev1 complex, polymerase iota, polymerase kappa, or polymerase eta. In some embodiments, a NAP or portion thereof incorporated into a base editor is a eukaryotic polymerase alpha, beta, gamma, delta, epsilon, gamma, eta, iota, kappa, lambda, mu, or nu component. In some embodiments, a NAP or portion thereof incorporated into a base editor comprises an amino acid sequence that is at least 75%, 80%, 85%, 90%, 95%, 96%, 97%, 98%, 99%, or 99.5% identical to a nucleic acid polymerase (e.g., a translesion DNA polymerase).

### Base Editor System

[0387] The base editor system provided herein comprises the steps of: (a) contacting a target nucleotide sequence of a polynucleotide (e.g., a double-stranded DNA or RNA, a single-stranded DNA or RNA) of a subject with a base editor system comprising a nucleobase editor (e.g., an adenosine base editor or a cytidine base editor) and a guide polynucleic acid (e.g., gRNA), wherein the target nucleotide sequence comprises a targeted nucleobase pair; (b) inducing strand separation of the target region; (c) converting a first nucleobase of the target nucleobase pair in a single strand of the target region to a second nucleobase; and (d) cutting no more than one strand of the target region, where a third nucleobase complementary to the first nucleobase base is replaced by a fourth nucleobase complementary to the second nucleobase. It should be appreciated that in some embodiments, step (b) is omitted. In some embodiments, the targeted nucleobase pair is a plurality of nucleobase pairs in one or more genes. In some embodiments, the base editor system provided herein is capable of multiplex editing of a plurality of nucleobase pairs in one or more genes. In some embodiments, the plurality of nucleobase pairs is located in the same gene. In some embodiments, the plurality of nucleobase pairs is located in one or more genes, wherein at least one gene is located in a different locus.

[0388] In some embodiments, the cut single strand (nicked strand) is hybridized to the guide nucleic acid. In some embodiments, the cut single strand is opposite to the strand comprising the first nucleobase. In some embodiments, the base editor comprises a Cas9 domain. In some embodiments, the first base is adenine, and the second base is not a G, C, A, or T. In some embodiments, the second base is inosine.

[0389] Base editing system as provided herein provides a new approach to genome editing that uses a fusion protein containing a catalytically defective Streptococcus pyogenes Cas9, a cytidine deaminase, and an inhibitor of base excision repair to induce programmable, single nucleotide (C→*T or A→*G) changes in DNA without generating double-strand DNA breaks, without requiring a donor DNA template, and without inducing an excess of stochastic insertions and deletions.

[0390] Provided herein are systems, compositions, and methods for editing a nucleobase using a base editor system. In some embodiments, the base editor system comprises (1) a base editor (BE) comprising a polynucleotide programmable nucleotide binding domain and a nucleobase editing domain (e.g., a deaminase domain) for editing the nucleobase; and (2) a guide polynucleotide (e.g., guide RNA) in conjunction with the polynucleotide programmable nucleotide binding domain. In some embodiments, the base editor system comprises a cytosine base editor (CBE). In some embodiments, the base editor system comprises an adenosine base editor (ABE). In some embodiments, the polynucleotide programmable nucleotide binding domain is a polynucleotide programmable DNA binding domain. In some embodiments, the polynucleotide programmable nucleotide binding domain is a polynucleotide programmable RNA binding domain. In some embodiments, the nucleobase editing domain is a deaminase domain. In some cases, a deaminase domain can be a cytosine deaminase or a cytidine deaminase. In some embodiments, the terms “cytosine deaminase” and “cytidine deaminase” can be used interchangeably. In some cases, a deaminase domain can be an adenine deaminase or an adenosine deaminase. In some embodiments, the terms “adenine deaminase” and “adenosine deaminase” can be used interchangeably. Details of nucleobase editing proteins are described in International PCT Application Nos. PCT/2017/045381 (WO2018/027078) and PCT/US2016/058344 (WO2017/070632), each of which is incorporated herein by reference for its entirety. Also see Komor, A. C., et al., “Programmable editing of a target base in genomic DNA without double-stranded DNA cleavage” Nature 533, 420-424 (2016); Gaudelli, N. M., et al., “Programmable base editing of A⋅T to G⋅C in genomic DNA without DNA cleavage” Nature 551, 464-471 (2017); and Komor, A. C., et al., “Improved base excision repair inhibition and bacteriophage Mu Gam protein yields C:G-to-T:A base editors with higher efficiency and product purity” Science Advances 3:eaao4774 (2017), the entire contents of which are hereby incorporated by reference.

[0391] In some embodiments, a nucleobase editor system may comprise more than one base editing component. For example, a nucleobase editor system may include more than one deaminase. In some embodiments, a nuclease base editor system may include one or more cytidine deaminase and/or one or more adenosine deaminases. In some embodiments, a single guide polynucleotide may be utilized to target different deaminases to a target nucleic acid sequence. In some embodiments, a single pair of guide polynucleotides may be utilized to target different deaminases to a target nucleic acid sequence.

[0392] The nucleobase component and the polynucleotide programmable nucleotide binding component of a base editor system may be associated with each other covalently or non-covalently. For example, in some embodiments, a deaminase domain can be targeted to a target nucleotide sequence by a polynucleotide programmable nucleotide binding domain. In some embodiments, a polynucleotide programmable nucleotide binding domain can be fused or linked to a deaminase domain. In some embodiments, a polynucleotide programmable nucleotide binding domain can target a deaminase domain to a target nucleotide sequence by non-covalently interacting with or associating with the deaminase domain. For example, in some embodiments, the nucleobase editing component, e.g. the deaminase component can comprise an additional heterologous portion or domain that is capable of interacting with, associating with, or capable of forming a complex with an additional heterologous portion or domain that is part of a polynucleotide programmable nucleotide binding domain. In some embodiments, the additional heterologous portion may be capable of binding to, interacting with, associating with, or forming a complex with a polypeptide. In some embodiments, the additional heterologous portion may be capable of binding to, interacting with, associating with, or forming a complex with a polynucleotide. In some embodiments, the additional heterologous portion may be capable of binding to a guide polynucleotide. In some embodiments, the additional heterologous portion may be capable of binding to a polypeptide linker. In some embodiments, the additional heterologous portion may be capable of binding to a polynucleotide linker. The additional heterologous portion may be a protein domain. In some embodiments, the additional heterologous portion may be a K Homology (KH) domain, a MS2 coat protein domain, a PP7 coat protein domain, a SfMu Com coat protein domain, a steril alpha motif, a telomerase Ku binding motif and Ku protein, a telomerase Sm7 binding motif and Sm7 protein, or a RNA recognition motif.

[0393] A base editor system may further comprise a guide polynucleotide component. It should be appreciated that components of the base editor system may be associated with each other via covalent bonds, noncovalent interactions, or any combination of associations and interactions thereof. In some embodiments, a deaminase domain can be targeted to a target nucleotide sequence by a guide polynucleotide. For example, in some embodiments, the nucleobase editing component of the base editor system, e.g. the deaminase component, can comprise an additional heterologous portion or domain (e.g., polynucleotide binding domain such as an RNA or DNA binding protein) that is capable of interacting with, associating with, or capable of forming a complex with a portion or segment (e.g., a polynucleotide motif) of a guide polynucleotide. In some embodiments, the additional heterologous portion or domain (e.g., polynucleotide binding domain such as an RNA or DNA binding protein) can be fused or linked to the deaminase domain. In some embodiments, the additional heterologous portion may be capable of binding to, interacting with, associating with, or forming a complex with a polypeptide. In some embodiments, the additional heterologous portion may be capable of binding to, interacting with, associating with, or forming a complex with a polynucleotide. In some embodiments, the additional heterologous portion may be capable of binding to a guide polynucleotide. In some embodiments, the additional heterologous portion may be capable of binding to a polypeptide linker. In some embodiments, the additional heterologous portion may be capable of binding to a polynucleotide linker. The additional heterologous portion may be a protein domain. In some embodiments, the additional heterologous portion may be a K Homology (KH) domain, a MS2 coat protein domain, a PP7 coat protein domain, a SfMu Com coat protein domain, a sterile alpha motif, a telomerase Ku binding motif and Ku protein, a telomerase Sm7 binding motif and Sm7 protein, or a RNA recognition motif.

[0394] In some embodiments, a base editor system can further comprise an inhibitor of base excision repair (BER) component. It should be appreciated that components of the base editor system may be associated with each other via covalent bonds, noncovalent interactions, or any combination of associations and interactions thereof. The inhibitor of BER component may comprise a base excision repair inhibitor. In some embodiments, the inhibitor of base excision repair can be a uracil DNA glycosylase inhibitor (UGI). In some embodiments, the inhibitor of base excision repair can be an inosine base excision repair inhibitor. In some embodiments, the inhibitor of base excision repair can be targeted to the target nucleotide sequence by the polynucleotide programmable nucleotide binding domain. In some embodiments, a polynucleotide programmable nucleotide binding domain can be fused or linked to an inhibitor of base excision repair. In some embodiments, a polynucleotide programmable nucleotide binding domain can be fused or linked to a deaminase domain and an inhibitor of base excision repair. In some embodiments, a polynucleotide programmable nucleotide binding domain can target an inhibitor of base excision repair to a target nucleotide sequence by non-covalently interacting with or associating with the inhibitor of base excision repair. For example, in some embodiments, the inhibitor of base excision repair component can comprise an additional heterologous portion or domain that is capable of interacting with, associating with, or capable of forming a complex with an additional heterologous portion or domain that is part of a polynucleotide programmable nucleotide binding domain. In some embodiments, the inhibitor of base excision repair can be targeted to the target nucleotide sequence by the guide polynucleotide. For example, in some embodiments, the inhibitor of base excision repair can comprise an additional heterologous portion or domain (e.g., polynucleotide binding domain such as an RNA or DNA binding protein) that is capable of interacting with, associating with, or capable of forming a complex with a portion or segment (e.g., a polynucleotide motif) of a guide polynucleotide. In some embodiments, the additional heterologous portion or domain of the guide polynucleotide (e.g., polynucleotide binding domain such as an RNA or DNA binding protein) can be fused or linked to the inhibitor of base excision repair. In some embodiments, the additional heterologous portion may be capable of binding to, interacting with, associating with, or forming a complex with a polynucleotide. In some embodiments, the additional heterologous portion may be capable of binding to a guide polynucleotide. In some embodiments, the additional heterologous portion may be capable of binding to a polypeptide linker. In some embodiments, the additional heterologous portion may be capable of binding to a polynucleotide linker. The additional heterologous portion may be a protein domain. In some embodiments, the additional heterologous portion may be a K Homology (KH) domain, a MS2 coat protein domain, a PP7 coat protein domain, a SfMu Com coat protein domain, a sterile alpha motif, a telomerase Ku binding motif and Ku protein, a telomerase Sm7 binding motif and Sm7 protein, or a RNA recognition motif.

[0395] In some embodiments, the base editor inhibits base excision repair of the edited strand. In some embodiments, the base editor protects or binds the non-edited strand. In some embodiments, the base editor comprises UGI activity. In some embodiments, the base editor comprises a catalytically inactive inosine-specific nuclease. In some embodiments, the base editor comprises nickase activity. In some embodiments, the intended edit of base pair is upstream of a PAM site. In some embodiments, the intended edit of base pair is 1, 2, 3, 4, 5, 6, 7, 8, 9, 10, 11, 12, 13, 14, 15, 16, 17, 18, 19, or 20 nucleotides upstream of the PAM site. In some embodiments, the intended edit of base-pair is downstream of a PAM site. In some embodiments, the intended edited base pair is 1, 2, 3, 4, 5, 6, 7, 8, 9, 10, 11, 12, 13, 14, 15, 16, 17, 18, 19, or 20 nucleotides downstream stream of the PAM site.

[0396] In some embodiments, the method does not require a canonical (e.g., NGG) PAM site. In some embodiments, the nucleobase editor comprises a linker or a spacer. In some embodiments, the linker or spacer is 1-25 amino acids in length. In some embodiments, the linker or spacer is 5-20 amino acids in length. In some embodiments, the linker or spacer is 10, 11, 12, 13, 14, 15, 16, 17, 18, 19, or 20 amino acids in length.

[0397] In some embodiments, the target region comprises a target window, wherein the target window comprises the target nucleobase pair. In some embodiments, the target window comprises 1-10 nucleotides. In some embodiments, the target window is 1, 2, 3, 4, 5, 6, 7, 8, 9, 10, 11, 12, 13, 14, 15, 16, 17, 18, 19, or 20 nucleotides in length. In some embodiments, the intended edit of base pair is within the target window. In some embodiments, the target window comprises the intended edit of base pair. In some embodiments, the method is performed using any of the base editors provided herein. In some embodiments, a target window is a deamination window.

[0398] In some embodiments, the base editor is a cytidine base editor (CBE). In some embodiments, non-limiting exemplary CBE is BE1 (APOBEC1-XTEN-dCas9), BE2 (APOBEC1-XTEN-dCas9-UGI), BE3 (APOBEC1-XTEN-dCas9(A840H)-UGI), BE3-Gam, saBE3, saBE4-Gam, BE4, BE4-Gam, saBE4, or saB4E-Gam. BE4 extends the APOBEC1-Cas9n(D10A) linker to 32 amino acids and the Cas9n-UGI linker to 9 amino acids, and appends a second copy of UGI to the C terminus of the construct with another 9 amino acid linker into a single base editor construct. The base editors saBE3 and saBE4 have the S. pyogene Cas9n(D10A) replaced with the smaller S. aureus Cas9n(D10A). BE3-Gam, saBE3-Gam, BE4-Gam, and saBE4-Gam have 174 residues of Gam protein fused to the N-terminus of BE3, saBE3, BE4, and saBE4 via the 16 amino acid XTEN linker.

[0399] In some embodiments, the base editor is an adenosine base editor (ABE). In some embodiments, the adenosine base editor can deaminate adenine in DNA. In some embodiments, ABE is generated by replacing APOBEC1 component of BE3 with natural or engineered E. coli TadA, human ADAR2, mouse ADA, or human ADAT2. In some embodiments, ABE comprises evolved TadA variant. In some embodiments, the ABE is ABE 1.2 (TadA*-XTEN-nCas9-NLS). In some embodiments, TadA* comprises A106V and D108N mutations.

[0400] In some embodiments, the ABE is a second generation ABE. In some embodiments, the ABE is ABE2.1, which comprises additional mutations D147Y and E155V in TadA* (TadA*2.1). In some embodiments, the ABE is ABE2.2, ABE2.1 fused to catalytically inactivated version of human alkyl adenine DNA glycosylase (AAG with E125Q mutation). In some embodiments, the ABE is ABE2.3, ABE2.1 fused to catalytically inactivated version of E. coli Endo V (inactivated with D35A mutation). In some embodiments, the ABE is ABE2.6 which has a linker twice as long (32 amino acids, (SGGS)₂-XTEN-(SGGS)₂ (“(SGGS)₂” disclosed as SEQ ID NO: 138)) as the linker in ABE2.1. In some embodiments, the ABE is ABE2.7, which is ABE2.1 tethered with an additional wild-type TadA monomer. In some embodiments, the ABE is ABE2.8, which is ABE2.1 tethered with an additional TadA*2.1 monomer. In some embodiments, the ABE is ABE2.9, which is a direct fusion of evolved TadA (TadA*2.1) to the N-terminus of ABE2.1. In some embodiments, the ABE is ABE2.10, which is a direct fusion of wild type TadA to the N-terminus of ABE2.1. In some embodiments, the ABE is ABE2.11, which is ABE2.9 with an inactivating E59A mutation at the N-terminus of TadA* monomer. In some embodiments, the ABE is ABE2.12, which is ABE2.9 with an inactivating E59A mutation in the internal TadA* monomer.

[0401] In some embodiments, the ABE is a third generation ABE. In some embodiments, the ABE is ABE3.1, which is ABE2.3 with three additional TadA mutations (L84F, H123Y, and I157F).

[0402] In some embodiments, the ABE is a fourth generation ABE. In some embodiments, the ABE is ABE4.3, which is ABE3.1 with an additional TadA mutation A142N (TadA*4.3).

[0403] In some embodiments, the ABE is a fifth generation ABE. In some embodiments, the ABE is ABE5.1, which is generated by importing a consensus set of mutations from surviving clones (H36L, R51L, S146C, and K157N) into ABE3.1. In some embodiments, the ABE is ABE5.3, which has a heterodimeric construct containing wild-type E. coli TadA fused to an internal evolved TadA*. In some embodiments, the ABE is ABE5.2, ABE5.4, ABE5.5, ABE5.6, ABE5.7, ABE5.8, ABE5.9, ABE5.10, ABE5.11, ABE5.12, ABE5.13, or ABE5.14, as shown in below Table 2. In some embodiments, the ABE is a sixth generation ABE. In some embodiments, the ABE is ABE6.1, ABE6.2, ABE6.3, ABE6.4, ABE6.5, or ABE6.6, as shown in below Table 2. In some embodiments, the ABE is a seventh generation ABE. In some embodiments, the ABE is ABE7.1, ABE7.2, ABE7.3, ABE7.4, ABE7.5, ABE7.6, ABE7.7, ABE7.8, ABE7.9, or ABE7.10, as shown in below Table 2.

TABLE 2
Genotypes of ABEs

| | 23 | 26 | 36 | 37 | 48 | 49 | 51 | 72 | 84 | 87 | 105 | 108 | 123 | 125 | 142 | 145 | 147 | 152 | 155 | 156 | 157 | 16 |
|---|---|---|---|---|---|---|---|---|---|---|---|---|---|---|---|---|---|---|---|---|---|---|
| ABE0.1 | W | R | H | N | P | | R | N | L | S | A | D | H | G | A | S | D | R | E | 1 | K | K |
| ABE0.2 | W | R | H | N | P | | R | N | L | S | A | D | H | G | A | S | D | R | E | I | K | K |
| ABE1.1 | W | R | H | N | P | | R | N | L | S | A | N | H | G | A | S | D | R | E | I | K | K |
| ABE1.2 | W | R | H | N | P | | R | N | L | S | V | N | H | G | A | S | D | R | E | I | K | K |
| ABE2.1 | W | R | H | N | P | | R | N | L | S | V | N | H | G | A | S | Y | R | V | I | K | K |
| ABE2.2 | W | R | H | N | P | | R | N | L | S | V | N | H | G | A | S | Y | R | V | I | K | K |
| ABE2.3 | W | R | H | N | P | | R | N | L | S | V | N | H | G | A | S | Y | R | V | I | K | K |
| ABE2.4 | W | R | H | N | P | | R | N | L | S | V | N | H | G | A | S | Y | R | V | I | K | K |
| ABE2.5 | W | R | H | N | P | | R | N | L | S | V | N | H | G | A | S | Y | R | V | I | K | K |
| ABE2.6 | W | R | H | N | P | | R | N | L | S | V | N | H | G | A | S | Y | R | V | I | K | K |
| ABE2.7 | W | R | H | N | P | | R | N | L | S | V | N | H | G | A | S | Y | R | V | I | K | K |
| ABE2.8 | W | R | H | N | P | | R | N | L | S | V | N | H | G | A | S | Y | R | V | I | K | K |
| ABE2.9 | W | R | H | N | P | | R | N | L | S | V | N | H | G | A | S | Y | R | V | I | K | K |
| ABE2.10 | W | R | H | N | P | | R | N | L | S | V | N | H | G | A | S | Y | R | V | I | K | K |
| ABE2.11 | W | R | H | N | P | | R | N | L | S | V | N | H | G | A | S | Y | R | V | I | K | K |
| ABE2.12 | W | R | H | N | P | | R | N | L | S | V | N | H | G | A | S | Y | R | V | I | K | K |
| ABE3.1 | W | R | H | N | P | | R | N | F | S | V | N | Y | G | A | S | Y | R | V | F | K | K |
| ABE3.2 | W | R | H | N | P | | R | N | F | S | V | N | Y | G | A | S | Y | R | V | F | K | K |
| ABE3.3 | W | R | H | N | P | | R | N | F | S | V | N | Y | G | A | S | Y | R | V | F | K | K |
| ABE3.4 | W | R | H | N | P | | R | N | F | S | V | N | Y | G | A | S | Y | R | V | F | K | K |
| ABE3.5 | W | R | H | N | P | | R | N | F | S | V | N | Y | G | A | S | Y | R | V | F | K | K |
| ABE3.6 | W | R | H | N | P | | R | N | F | S | V | N | Y | G | A | S | Y | R | V | F | K | K |
| ABE3.7 | W | R | H | N | P | | R | N | F | S | V | N | Y | G | A | S | Y | R | V | F | K | K |
| ABE3.8 | W | R | H | N | P | | R | N | F | S | V | N | Y | G | A | S | Y | R | V | F | K | K |
| ABE4.1 | W | R | H | N | P | | R | N | L | S | V | N | H | G | N | S | Y | R | V | I | K | K |
| ABE4.2 | W | G | H | N | P | | R | N | L | S | V | N | H | G | N | S | Y | R | V | I | K | K |
| ABE4.3 | W | R | H | N | P | | R | N | F | S | V | N | Y | G | N | S | Y | R | V | F | K | K |
| ABE5.1 | W | R | L | N | P | | L | N | F | S | V | N | Y | G | A | C | Y | R | V | F | N | K |
| ABE5.2 | W | R | H | S | P | | R | N | F | S | V | N | Y | G | A | S | Y | R | V | F | K | T |
| ABE5.3 | W | R | L | N | P | | L | N | I | S | V | N | Y | G | A | C | Y | R | V | I | N | K |
| ABE5.4 | W | R | H | S | P | | R | N | F | S | V | N | Y | G | A | S | Y | R | V | F | K | T |
| ABE5.5 | W | R | L | N | P | | L | N | F | S | V | N | Y | G | A | C | Y | R | V | F | N | K |
| ABE5.6 | W | R | L | N | P | | L | N | F | S | V | N | Y | G | A | C | Y | R | V | F | N | K |
| ABE5.7 | W | R | L | N | P | | L | N | F | S | V | N | Y | G | A | C | Y | R | V | F | N | K |
| ABE5.8 | W | R | L | N | P | | L | N | F | S | V | N | Y | G | A | C | Y | R | V | F | N | K |
| ABE5.9 | W | R | L | N | P | | L | N | F | S | V | N | Y | G | A | C | Y | R | V | F | N | K |
| ABE5.10 | W | R | L | N | P | | L | N | F | S | V | N | Y | G | A | C | Y | R | V | F | N | K |
| ABE5.11 | W | R | L | N | P | | L | N | F | S | V | N | Y | G | A | C | Y | R | V | F | N | K |
| ABE5.12 | W | R | L | N | P | | L | N | F | S | V | N | Y | G | A | C | Y | R | V | F | N | K |
| ABE5.13 | W | R | H | N | P | | L | D | F | S | V | N | Y | A | A | S | Y | R | V | F | K | K |
| ABE5.14 | W | R | H | N | S | | L | N | F | C | V | N | Y | G | A | S | Y | R | V | F | K | K |
| ABE6.1 | W | R | H | N | S | | L | N | F | S | V | N | Y | G | N | S | Y | R | V | F | K | K |
| ABE6.2 | W | R | H | N | T | V | L | N | F | S | V | N | Y | G | N | S | Y | R | V | F | N | K |
| ABE6.3 | W | R | L | N | S | | L | N | F | S | V | N | Y | G | A | C | Y | R | V | F | N | K |
| ABE6.4 | W | R | L | N | S | | L | N | F | S | V | N | Y | G | N | C | Y | R | V | F | N | K |
| ABE6.5 | W | R | L | N | I | V | L | N | F | S | V | N | Y | G | A | C | Y | R | V | F | N | K |
| ABE6.6 | W | R | L | N | T | V | L | N | F | S | V | N | Y | G | N | C | Y | R | V | F | N | K |
| ABE7.1 | W | R | L | N | A | | L | N | F | S | V | N | Y | G | A | C | Y | R | V | F | N | K |
| ABE7.2 | W | R | L | N | A | | L | N | F | S | V | N | Y | G | N | C | Y | R | V | F | N | K |
| ABE7.3 | I | R | L | N | A | | L | N | F | S | V | N | Y | G | A | C | Y | R | V | F | N | K |
| ABE7.4 | R | R | L | N | A | | L | N | F | S | V | N | Y | G | A | C | Y | R | V | F | N | K |
| ABE7.5 | W | R | L | N | A | | L | N | F | S | V | N | Y | G | A | C | Y | H | V | F | N | K |
| ABE7.6 | W | R | L | N | A | | L | N | I | S | V | N | Y | G | A | C | Y | P | V | I | N | K |
| ABE7.7 | L | R | L | N | A | | L | N | F | S | V | N | Y | G | A | C | Y | P | V | F | N | K |
| ABE7.8 | I | R | L | N | A | | L | N | F | S | V | N | Y | G | N | C | Y | R | V | F | N | K |
| ABE7.9 | L | R | L | N | A | | L | N | F | S | V | N | Y | G | N | C | Y | P | V | F | N | K |
| ABE7.10 | R | R | L | N | A | | L | N | F | S | V | N | Y | G | A | C | Y | P | V | F | N | K |

[0404] In some embodiments, the base editor is a fusion protein comprising a polynucleotide programmable nucleotide binding domain (e.g., Cas9-derived domain) fused to a nucleobase editing domain (e.g., all or a portion of a deaminase domain). In some embodiments, the base editor further comprises a domain comprising all or a portion of a uracil glycosylase inhibitor (UGI). In some embodiments, the base editor comprises a domain comprising all or a portion of a uracil binding protein (UBP), such as a uracil DNA glycosylase (UDG). In some embodiments, the base editor comprises a domain comprising all or a portion of a nucleic acid polymerase. In some embodiments, a nucleic acid polymerase or portion thereof incorporated into a base editor is a translesion DNA polymerase.

[0405] In some embodiments, a domain of the base editor can comprise multiple domains. For example, the base editor comprising a polynucleotide programmable nucleotide binding domain derived from Cas9 can comprise an REC lobe and an NUC lobe corresponding to the REC lobe and NUC lobe of a wild-type or natural Cas9. In another example, the base editor can comprise one or more of a RuvCI domain, BH domain, REC1 domain, REC2 domain, RuvCII domain, L1 domain, HNH domain, L2 domain, RuvCIII domain, WED domain, TOPO domain or CTD domain. In some embodiments, one or more domains of the base editor comprise a mutation (e.g., substitution, insertion, deletion) relative to a wild type version of a polypeptide comprising the domain. For example, an HNH domain of a polynucleotide programmable DNA binding domain can comprise an H840A substitution. In another example, a RuvCI domain of a polynucleotide programmable DNA binding domain can comprise a D10A substitution.

[0406] Different domains (e.g. adjacent domains) of the base editor disclosed herein can be connected to each other with or without the use of one or more linker domains (e.g. an XTEN linker domain). In some cases, a linker domain can be a bond (e.g., covalent bond), chemical group, or a molecule linking two molecules or moieties, e.g., two domains of a fusion protein, such as, for example, a first domain (e.g., Cas9-derived domain) and a second domain (e.g., a cytidine deaminase domain or adenosine deaminase domain). In some embodiments, a linker is a covalent bond (e.g., a carbon-carbon bond, disulfide bond, carbon-hetero atom bond, etc.). In certain embodiments, a linker is a carbon nitrogen bond of an amide linkage. In certain embodiments, a linker is a cyclic or acyclic, substituted or unsubstituted, branched or unbranched aliphatic or heteroaliphatic linker. In certain embodiments, a linker is polymeric (e.g., polyethylene, polyethylene glycol, polyamide, polyester, etc.). In certain embodiments, a linker comprises a monomer, dimer, or polymer of aminoalkanoic acid. In some embodiments, a linker comprises an aminoalkanoic acid (e.g., glycine, ethanoic acid, alanine, beta-alanine, 3-aminopropanoic acid, 4-aminobutanoic acid, 5-pentanoic acid, etc.). In some embodiments, a linker comprises a monomer, dimer, or polymer of aminohexanoic acid (Ahx). In certain embodiments, a linker is based on a carbocyclic moiety (e.g., cyclopentane, cyclohexane). In other embodiments, a linker comprises a polyethylene glycol moiety (PEG). In certain embodiments, a linker comprises an aryl or heteroaryl moiety. In certain embodiments, the linker is based on a phenyl ring. A linker can include functionalized moieties to facilitate attachment of a nucleophile (e.g., thiol, amino) from the peptide to the linker. Any electrophile can be used as part of the linker. Exemplary electrophiles include, but are not limited to, activated esters, activated amides, Michael acceptors, alkyl halides, aryl halides, acyl halides, and isothiocyanates. In some embodiments, a linker joins a gRNA binding domain of an RNA-programmable nuclease, including a Cas9 nuclease domain, and the catalytic domain of a nucleic acid editing protein. In some embodiments, a linker joins a dCas9 and a second domain (e.g., cytidine deaminase, UGI, etc.).

[0407] Typically, a linker is positioned between, or flanked by, two groups, molecules, or other moieties and connected to each one via a covalent bond, thus connecting the two. In some embodiments, a linker is an amino acid or a plurality of amino acids (e.g., a peptide or protein). In some embodiments, a linker is an organic molecule, group, polymer, or chemical moiety. In some embodiments, a linker is 2-100 amino acids in length, for example, 2, 3, 4, 5, 6, 7, 8, 9, 10, 11, 12, 13, 14, 15, 16, 17, 18, 19, 20, 21, 22, 23, 24, 25, 26, 27, 28, 29, 30, 30-35, 35-40, 40-45, 45-50, 50-60, 60-70, 70-80, 80-90, 90-100, 100-150, or 150-200 amino acids in length. In some embodiments, the linker is about 3 to about 104 (e.g., 5, 6, 7, 8, 9, 10, 11, 12, 13, 14, 15, 16, 17, 18, 19, 20, 21, 22, 23, 24, 25, 26, 27, 28, 29, 30, 31, 32, 33, 34, 35, 36, 37, 38, 39, 40, 41, 42, 43, 44, 45, 46, 47, 48, 49, 50, 55, 60, 65, 70, 75, 80, 85, 90, 95, or 100) amino acids in length. Longer or shorter linkers are also contemplated. In some embodiments, a linker domain comprises the amino acid sequence SGSETPGTSESATPES (SEQ ID NO: 16), which can also be referred to as the XTEN linker. Any method for linking the fusion protein domains can be employed (e.g., ranging from very flexible linkers of the form (SGGS)n (SEQ ID NO: 18), (GGGS)n (SEQ ID NO: 19), (GGGGS)n (SEQ ID NO: 20), and (G)n (SEQ ID NO: 21), to more rigid linkers of the form (EAAAK)n (SEQ ID NO: 22), (GGS)n (SEQ ID NO: 23), SGSETPGTSESATPES (SEQ ID NO: 16) (see, e.g., Guilinger J P, Thompson D B, Liu D R. Fusion of catalytically inactive Cas9 to FokI nuclease improves the specificity of genome modification. Nat. Biotechnol. 2014; 32(6): 577-82; the entire contents are incorporated herein by reference), or (XP)n motif (SEQ ID NO: 24), or a combination of any of these, in order to achieve the optimal length for activity for the nucleobase editor, wherein n is independently an integer between 1 and 30, and wherein X is any amino acid. In some embodiments, n is 1, 2, 3, 4, 5, 6, 7, 8, 9, 10, 11, 12, 13, 14, or 15. In some embodiments, the linker comprises a (GGS)n motif, wherein n is 1, 3, or 7 (SEQ ID NO: 139). In some embodiments, the Cas9 domain of the fusion proteins provided herein are fused via a linker comprising the amino acid sequence SGSETPGTSESATPES (SEQ ID NO: 16). In some embodiments, a linker comprises a plurality of proline residues and is 5-21, 5-14, 5-9, 5-7 amino acids in length, e.g., PAPAP (SEQ ID NO: 25), PAPAPA (SEQ ID NO: 26), PAPAPAP (SEQ ID NO: 27), PAPAPAPA (SEQ ID NO: 28), P(AP)₄ (SEQ ID NO: 29), P(AP)₇ (SEQ ID NO: 30), P(AP)₁₀ (SEQ ID NO: 31) (see, e.g., Tan J, Zhang F, Karcher D, Bock R. Engineering of high-precision base editors for site-specific single nucleotide replacement. Nat Commun. 2019 Jan. 25; 10(1):439; the entire contents are incorporated herein by reference). Such proline-rich linkers are also termed “rigid” linkers.

[0408] The domains of the base editor disclosed herein can be arranged in any order. Non-limiting examples of a base editor comprising a fusion protein comprising e.g., a polynucleotide-programmable nucleotide-binding domain and a deaminase domain can be arranged as following:
[0409] NH₂-[nucleobase editing domain]-Linker1-[e.g., Cas9 derived domain]-COOH;
[0410] NH₂-[e.g., cytidine deaminase]-Linker1-[e.g., Cas9 derived domain]-COOH;
[0411] NH₂-[e.g., cytidine deaminase]-Linker1-[e.g., Cas9 derived domain]-Linker2-[UGI]-COOH;
[0412] NH₂-[e.g., APOBEC]-Linker1-[e.g., Cas9 derived domain]-COOH;
[0413] NH₂-[e.g., cytidine deaminase]-Linker1-[e.g., Cas9 derived domain]-COOH;
[0414] NH₂-[e.g., APOBEC]-Linker1-[e.g. Cas9 derived domain]-COOH;
[0415] NH₂-[e.g., APOBEC]-Linker1-[e.g. Cas9 derived domain]-Linker2-[UGI]-COOH
[0416] NH₂-[e.g., adenosine deaminase]-[e.g., Cas9 derived domain]-COOH;
[0417] NH₂-[e.g., Cas9 derived domain]-[e.g., adenosine deaminase]-COOH;
[0418] NH₂-[e.g., adenosine deaminase]-[e.g., Cas9 derived domain]-[inosine BER inhibitor]-COOH;
[0419] NH₂-[e.g., adenosine deaminase]-[inosine BER inhibitor]-[e.g., Cas9 derived domain]-COOH;
[0420] NH₂-[inosine BER inhibitor]-[e.g., adenosine deaminase]-[e.g., Cas9 derived domain]-COOH;
[0421] NH₂-[e.g., Cas9 derived domain]-[e.g., adenosine deaminase]-[inosine BER inhibitor]-COOH;
[0422] NH₂-[e.g., Cas9 derived domain]-[inosine BER inhibitor]-[e.g., adenosine deaminase]-COOH; or
[0423] NH₂-[inosine BER inhibitor]-[e.g., Cas9 derived domain]-[e.g., adenosine deaminase]-COOH.

[0424] Additionally, in some cases, a Gam protein can be fused to an N terminus of a base editor. In some cases, a Gam protein can be fused to a C terminus of a base editor. The Gam protein of bacteriophage Mu can bind to the ends of double strand breaks (DSBs) and protect them from degradation. In some embodiments, using Gam to bind the free ends of DSB can reduce indel formation during the process of base editing. In some embodiments, 174-residue Gam protein is fused to the N terminus of the base editors. See. Komor, A. C., et al., “Improved base excision repair inhibition and bacteriophage Mu Gam protein yields C:G-to-T:A base editors with higher efficiency and product purity” Science Advances 3:eaao4774 (2017). In some cases, a mutation or mutations can change the length of a base editor domain relative to a wild type domain. For example, a deletion of at least one amino acid in at least one domain can reduce the length of the base editor. In another case, a mutation or mutations do not change the length of a domain relative to a wild type domain. For example, substitution(s) in any domain does/do not change the length of the base editor. Non-limiting examples of such base editors, where the length of all the domains is the same as the wild type domains, can include:
[0425] NH₂-[APOBEC1]-Linker1-[Cas9(D10A)]-Linker2-[UGI]-COOH;
[0426] NH₂-[CDA1]-Linker1-[Cas9(D10A)]-Linker2-[UGI]-COOH;
[0427] NH₂-[AID]-Linker1-[Cas9(D10A)]-Linker2-[UGI]-COOH;
[0428] NH₂-[APOBEC1]-Linker1-[Cas9(D10A)]-Linker2-[SSB]-COOH;
[0429] NH₂-[UGI]-Linker1-[ABOBEC1]-Linker2-[Cas9(D10A)]-COOH;
[0430] NH₂-[APOBEC1]-Linker1-[Cas9(D10A)]-Linker2-[UGI]-Linker3-[UGI]-COOH;
[0431] NH₂-[Cas9(D10A)]-Linker1-[CDA1]-Linker2-[UGI]-COOH;
[0432] NH₂-[Gam]-Linker1-[APOBEC1]-Linker2-[Cas9(D10A)]-Linker3-[UGI]-COOH;
[0433] NH₂-[Gam]-Linker1-[APOBEC1]-Linker2-[Cas9(D10A)]-Linker3-[UGI]-Linker4-[UGI]-COOH;
[0434] NH₂-[APOBEC1]-Linker1-[dCas9(D10A, H840A)]-Linker2-[UGI]-COOH; or
[0435] NH₂-[APOBEC1]-Linker1-[dCas9(D10A, H840A)]-COOH.

[0436] In some embodiments, the base editing fusion proteins provided herein need to be positioned at a precise location, for example, where a target base is placed within a defined region (e.g., a “deamination window”). In some cases, a target can be within a 4 base region. In some cases, such a defined target region can be approximately 15 bases upstream of the PAM. See Komor, A. C., et al., “Programmable editing of a target base in genomic DNA without double-stranded DNA cleavage” Nature 533, 420-424 (2016); Gaudelli, N. M., et al., “Programmable base editing of A⋅T to G⋅C in genomic DNA without DNA cleavage” Nature 551, 464-471 (2017); and Komor, A. C., et al., “Improved base excision repair inhibition and bacteriophage Mu Gam protein yields C:G-to-T:A base editors with higher efficiency and product purity” Science Advances 3:eaao4774 (2017), the entire contents of which are hereby incorporated by reference.

[0437] A defined target region can be a deamination window. A deamination window can be the defined region in which a base editor acts upon and deaminates a target nucleotide. In some embodiments, the deamination window is within a 2, 3, 4, 5, 6, 7, 8, 9, or 10 base regions. In some embodiments, the deamination window is 5, 6, 7, 8, 9, 10, 11, 12, 13, 14, 15, 16, 17, 18, 19, 20, 21, 22, 23, 24, or 25 bases upstream of the PAM.

[0438] The base editors of the present disclosure can comprise any domain, feature or amino acid sequence which facilitates the editing of a target polynucleotide sequence. For example, in some embodiments, the base editor comprises a nuclear localization sequence (NLS). In some embodiments, an NLS of the base editor is localized between a deaminase domain and a polynucleotide programmable nucleotide binding domain. In some embodiments, an NLS of the base editor is localized C-terminal to a polynucleotide programmable nucleotide binding domain.

[0439] Other exemplary features that can be present in a base editor as disclosed herein are localization sequences, such as cytoplasmic localization sequences, export sequences, such as nuclear export sequences, or other localization sequences, as well as sequence tags that are useful for solubilization, purification, or detection of the fusion proteins. Suitable protein tags provided herein include, but are not limited to, biotin carboxylase carrier protein (BCCP) tags, myc-tags, calmodulin-tags, FLAG-tags, hemagglutinin (HA)-tags, polyhistidine tags, also referred to as histidine tags or His-tags, maltose binding protein (MBP)-tags, nus-tags, glutathione-S-transferase (GST)-tags, green fluorescent protein (GFP)-tags, thioredoxin-tags, S-tags, Softags (e.g., Softag 1, Softag 3), strep-tags, biotin ligase tags, FlAsH tags, V5 tags, and SBP-tags. Additional suitable sequences will be apparent to those of skill in the art. In some embodiments, the fusion protein comprises one or more His tags.

[0440] Non-limiting examples of protein domains which can be included in the fusion protein include a deaminase domain (e.g., cytidine deaminase and/or adenosine deaminase), a uracil glycosylase inhibitor (UGI) domain, epitope tags, reporter gene sequences, and/or protein domains having one or more of the following activities: methylase activity, demethylase activity, transcription activation activity, transcription repression activity, transcription release factor activity, histone modification activity, RNA cleavage activity, and nucleic acid binding activity. Additional domains can be a heterologous functional domain. Such heterologous functional domains can confer a function activity, such as DNA methylation, DNA damage, DNA repair, modification of a target polypeptide associated with target DNA (e.g., a histone, a DNA-binding protein, etc.), leading to, for example, histone methylation, histone acetylation, histone ubiquitination, and the like.

[0441] Other functions conferred can include methyltransferase activity, demethylase activity, deamination activity, dismutase activity, alkylation activity, depurination activity, oxidation activity, pyrimidine dimer forming activity, integrase activity, transposase activity, recombinase activity, polymerase activity, ligase activity, helicase activity, photolyase activity or glycosylase activity, acetyltransferase activity, deacetylase activity, kinase activity, phosphatase activity, ubiquitin ligase activity, deubiquitinating activity, adenylation activity, deadenylation activity, SUMOylating activity, deSUMOylating activity, ribosylation activity, deribosylation activity, myristoylation activity, remodeling activity, protease activity, oxidoreductase activity, transferase activity, hydrolase activity, lyase activity, isomerase activity, synthase activity, synthetase activity, and demyristoylation activity, or any combination thereof.

[0442] Non-limiting examples of epitope tags include histidine (His) tags, V5 tags, FLAG tags, influenza hemagglutinin (HA) tags, Myc tags, VSV-G tags, and thioredoxin (Trx) tags. Examples of reporter genes include, but are not limited to, glutathione-5-transferase (GST), horseradish peroxidase (HRP), chloramphenicol acetyltransferase (CAT) beta-galactosidase, beta-glucuronidase, luciferase, green fluorescent protein (GFP), HcRed, DsRed, cyan fluorescent protein (CFP), yellow fluorescent protein (YFP), and autofluorescent proteins including blue fluorescent protein (BFP). Additional protein sequences can include amino acid sequences that bind DNA molecules or bind other cellular molecules, including but not limited to maltose binding protein (MBP), S-tag, Lex A DNA binding domain (DBD) fusions, GAL4 DNA binding domain fusions, and herpes simplex virus (HSV) BP16 protein fusions.

### Base Editor Efficiency

[0443] CRISPR-Cas9 nucleases have been widely used to mediate targeted genome editing. In most genome editing applications, Cas9 forms a complex with a guide polynucleotide (e.g., single guide RNA (sgRNA)) and induces a double-stranded DNA break (DSB) at the target site specified by the sgRNA sequence. Cells primarily respond to this DSB through the non-homologous end-joining (NHEJ) repair pathway, which results in stochastic insertions or deletions (indels) that can cause frameshift mutations that disrupt the gene. In the presence of a donor DNA template with a high degree of homology to the sequences flanking the DSB, gene correction can be achieved through an alternative pathway known as homology directed repair (HDR). Unfortunately, under most non-perturbative conditions HDR is inefficient, dependent on cell state and cell type, and dominated by a larger frequency of indels. As most of the known genetic variations associated with human disease are point mutations, methods that can more efficiently and cleanly make precise point mutations are needed. Base editing system as provided herein provides a new way to edit genome editing without generating double-strand DNA breaks, without requiring a donor DNA template, and without inducing an excess of stochastic insertions and deletions.

[0444] The base editors provided herein are capable of modifying a specific nucleotide base without generating a significant proportion of indels. The term “indel(s)”, as used herein, refers to the insertion or deletion of a nucleotide base within a nucleic acid. Such insertions or deletions can lead to frame shift mutations within a coding region of a gene. In some embodiments, it is desirable to generate base editors that efficiently modify (e.g., mutate or deaminate) a specific nucleotide within a nucleic acid, without generating a large number of insertions or deletions (i.e., indels) in the target nucleotide sequence. In certain embodiments, any of the base editors provided herein are capable of generating a greater proportion of intended modifications (e.g., point mutations or deaminations) versus indels.

[0445] In some embodiments, any of base editor system provided herein results in less than 50%, less than 40%, less than 30%, less than 20%, less than 19%, less than 18%, less than 17%, less than 16%, less than 15%, less than 14%, less than 13%, less than 12%, less than 11%, less than 10%, less than 9%, less than 8%, less than 7%, less than 6%, less than 5%, less than 4%, less than 3%, less than 2%, less than 1%, less than 0.9%, less than 0.8%, less than 0.7%, less than 0.6%, less than 0.5%, less than 0.4%, less than 0.3%, less than 0.2%, less than 0.1%, less than 0.09%, less than 0.08%, less than 0.07%, less than 0.06%, less than 0.05%, less than 0.04%, less than 0.03%, less than 0.02%, or less than 0.01% indel formation in the target polynucleotide sequence.

[0446] Some aspects of the disclosure are based on the recognition that any of the base editors provided herein are capable of efficiently generating an intended mutation, such as a point mutation, in a nucleic acid (e.g. a nucleic acid within a genome of a subject) without generating a significant number of unintended mutations, such as unintended point mutations.

[0447] In some embodiments, any of the base editors provided herein are capable of generating at least 0.01% of intended mutations (i.e. at least 0.01% base editing efficiency). In some embodiments, any of the base editors provided herein are capable of generating at least 0.01%, 1%, 2%, 3%, 4%, 5%, 10%, 15%, 20%, 25%, 30%, 40%, 45%, 50%, 60%, 70%, 80%, 90%, 95%, or 99% of intended mutations.

[0448] In some embodiments, the base editors provided herein are capable of generating a ratio of intended point mutations to indels that is greater than 1:1. In some embodiments, the base editors provided herein are capable of generating a ratio of intended point mutations to indels that is at least 1.5:1, at least 2:1, at least 2.5:1, at least 3:1, at least 3.5:1, at least 4:1, at least 4.5:1, at least 5:1, at least 5.5:1, at least 6:1, at least 6.5:1, at least 7:1, at least 7.5:1, at least 8:1, at least 8.5:1, at least 9:1, at least 10:1, at least 11:1, at least 12:1, at least 13:1, at least 14:1, at least 15:1, at least 20:1, at least 25:1, at least 30:1, at least 40:1, at least 50:1, at least 100:1, at least 200:1, at least 300:1, at least 400:1, at least 500:1, at least 600:1, at least 700:1, at least 800:1, at least 900:1, or at least 1000:1, or more.

[0449] The number of intended mutations and indels can be determined using any suitable method, for example, as described in International PCT Application Nos. PCT/2017/045381 (WO2018/027078) and PCT/US2016/058344 (WO2017/070632); Komor, A. C., et al., “Programmable editing of a target base in genomic DNA without double-stranded DNA cleavage” Nature 533, 420-424 (2016); Gaudelli, N. M., et al., “Programmable base editing of A⋅T to G⋅C in genomic DNA without DNA cleavage” Nature 551, 464-471 (2017); and Komor, A. C., et al., “Improved base excision repair inhibition and bacteriophage Mu Gam protein yields C:G-to-T:A base editors with higher efficiency and product purity” Science Advances 3:eaao4774 (2017); the entire contents of which are hereby incorporated by reference.

[0450] In some embodiments, to calculate indel frequencies, sequencing reads are scanned for exact matches to two 10-bp sequences that flank both sides of a window in which indels can occur. If no exact matches are located, the read is excluded from analysis. If the length of this indel window exactly matches the reference sequence the read is classified as not containing an indel. If the indel window is two or more bases longer or shorter than the reference sequence, then the sequencing read is classified as an insertion or deletion, respectively. In some embodiments, the base editors provided herein can limit formation of indels in a region of a nucleic acid. In some embodiments, the region is at a nucleotide targeted by a base editor or a region within 2, 3, 4, 5, 6, 7, 8, 9, or 10 nucleotides of a nucleotide targeted by a base editor.

[0451] The number of indels formed at a target nucleotide region can depend on the amount of time a nucleic acid (e.g., a nucleic acid within the genome of a cell) is exposed to a base editor. In some embodiments, the number or proportion of indels is determined after at least 1 hour, at least 2 hours, at least 6 hours, at least 12 hours, at least 24 hours, at least 36 hours, at least 48 hours, at least 3 days, at least 4 days, at least 5 days, at least 7 days, at least 10 days, or at least 14 days of exposing the target nucleotide sequence (e.g., a nucleic acid within the genome of a cell) to a base editor. It should be appreciated that the characteristics of the base editors as described herein can be applied to any of the fusion proteins, or methods of using the fusion proteins provided herein.

### Multiplex Editing

[0452] In some embodiments, the base editor system provided herein is capable of multiplex editing of a plurality of nucleobase pairs in one or more genes. In some embodiments, the plurality of nucleobase pairs is located in the same gene. In some embodiments, the plurality of nucleobase pairs is located in one or more gene, wherein at least one gene is located in a different locus. In some embodiments, the multiplex editing can comprise one or more guide polynucleotides. In some embodiments, the multiplex editing can comprise one or more base editor system. In some embodiments, the multiplex editing can comprise one or more base editor systems with a single guide polynucleotide. In some embodiments, the multiplex editing can comprise one or more base editor system with a plurality of guide polynucleotides. In some embodiments, the multiplex editing can comprise one or more guide polynucleotide with a single base editor system. In some embodiments, the multiplex editing can comprise at least one guide polynucleotide that does not require a PAM sequence to target binding to a target polynucleotide sequence. In some embodiments, the multiplex editing can comprise at least one guide polynucleotide that require a PAM sequence to target binding to a target polynucleotide sequence. In some embodiments, the multiplex editing can comprise a mix of at least one guide polynucleotide that does not require a PAM sequence to target binding to a target polynucleotide sequence and at least one guide polynucleotide that require a PAM sequence to target binding to a target polynucleotide sequence. It should be appreciated that the characteristics of the multiplex editing using any of the base editors as described herein can be applied to any of combination of the methods of using any of the base editor provided herein. It should also be appreciated that the multiplex editing using any of the base editors as described herein can comprise a sequential editing of a plurality of nucleobase pairs.

[0453] The methods provided herein comprises the steps of: (a) contacting a target nucleotide sequence of a polynucleotide of a subject (e.g., a double-stranded DNA sequence) with a base editor system comprising a nucleobase editor (e.g., an adenosine base editor or a cytidine base editor) and a guide polynucleic acid (e.g., gRNA), wherein the target nucleotide sequence comprises a targeted nucleobase pair; (b) inducing strand separation of the target region; (c) editing a first nucleobase of the target nucleobase pair in a single strand of the target region to a second nucleobase; and (d) cutting no more than one strand of the target region, where a third nucleobase complementary to the first nucleobase base is replaced by a fourth nucleobase complementary to the second nucleobase.

[0454] In some embodiments, the plurality of nucleobase pairs are in one more genes. In some embodiments, the plurality of nucleobase pairs is in the same gene. In some embodiments, at least one gene in the one more genes is located in a different locus.

[0455] In some embodiments, the editing is editing of the plurality of nucleobase pairs in at least one protein coding region. In some embodiments, the editing is editing of the plurality of nucleobase pairs in at least one protein non-coding region. In some embodiments, the editing is editing of the plurality of nucleobase pairs in at least one protein coding region and at least one protein non-coding region.

[0456] In some embodiments, the editing is in conjunction with one or more guide polynucleotides. In some embodiments, the base editor system can comprise one or more base editor system. In some embodiments, the base editor system can comprise one or more base editor systems in conjunction with a single guide polynucleotide. In some embodiments, the base editor system can comprise one or more base editor system in conjunction with a plurality of guide polynucleotides. In some embodiments, the editing is in conjunction with one or more guide polynucleotide with a single base editor system. In some embodiments, the editing is in conjunction with at least one guide polynucleotide that does not require a PAM sequence to target binding to a target polynucleotide sequence. In some embodiments, the editing is in conjunction with at least one guide polynucleotide that require a PAM sequence to target binding to a target polynucleotide sequence. In some embodiments, the editing is in conjunction with a mix of at least one guide polynucleotide that does not require a PAM sequence to target binding to a target polynucleotide sequence and at least one guide polynucleotide that require a PAM sequence to target binding to a target polynucleotide sequence. It should be appreciated that the characteristics of the multiplex editing using any of the base editors as described herein can be applied to any of combination of the methods of using any of the base editors provided herein. It should also be appreciated that the editing can comprise a sequential editing of a plurality of nucleobase pairs.

### Methods of Using Base Editors

[0457] The correction of point mutations in disease-associated genes and alleles opens up new strategies for gene correction with applications in therapeutics and basic research.

[0458] The present disclosure provides methods for the treatment of a subject diagnosed with a disease associated with or caused by a point mutation that can be corrected by a base editor system provided herein. For example, in some embodiments, a method is provided that comprises administering to a subject having such a disease, e.g., a disease caused by a genetic mutation, an effective amount of a nucleobase editor (e.g., an adenosine deaminase base editor or a cytidine deaminase base editor) that corrects the point mutation in the disease associated gene.

[0459] In some embodiments, the disease is a proliferative disease. In some embodiments, the disease is a genetic disease. In some embodiments, the disease is a neoplastic disease. In some embodiments, the disease is a metabolic disease. In some embodiments, the disease is a lysosomal storage disease. Exemplary suitable diseases and disorders include, without limitation, retinitis pigmentosa (e.g., adRP-PRPF3, adRP-RHO), Usher syndrome type 1F, sickle cell disease, alpha-1 antitrypsin deficiency (A1AD), hepatic porphyria, MCAD deficiency, LAL deficiency, phenylketonuria (PKU), hemochromatosis, Von Gierke disease (GSD1a), Pompe disease (GSDII), Gaucher disease, Hurler syndrome (MPS1), cystic fibrosis, homocystinuria (HCU) or chronic pain. Other diseases that can be treated by correcting a point mutation or introducing a deactivating mutation into a disease-associated gene are known to those of skill in the art, and the disclosure is not limited in this respect. Provided are methods for the treatment of additional diseases or disorders, e.g., diseases or disorders that are associated or caused by a point mutation that can be corrected by deaminase mediated gene editing. Such diseases are described herein, and additional suitable diseases that can be treated with the strategies and fusion proteins provided herein will be apparent to those of skill in the art based on the instant disclosure.

[0460] In a certain aspect, methods are provided for the treatment of A1AD, which is associated or caused by a point mutation (e.g., in the SERPINA1 gene encoding the A1AT protein) and can be corrected by deaminase mediated gene editing.

[0461] It will be understood that the numbering of the specific positions or residues in the respective sequences, e.g., polynucleotide or amino acid sequences of a disease-related gene or its encoded protein, respectively, depends on the particular protein and numbering scheme used. Numbering can be different, e.g., in precursors of a mature protein and the mature protein itself, and differences in sequences from species to species can affect numbering. One of skill in the art will be able to identify the respective residue in any homologous protein and in the respective encoding nucleic acid by methods well known in the art, e.g., by sequence alignment and determination of homologous residues.

[0462] Provided herein are methods of using the base editor or base editor system for editing a nucleobase in a target nucleotide sequence associated with a disease or disorder. In some embodiments, the activity of the base editor (e.g., comprising an adenosine deaminase and a Cas9 domain) results in a correction of the point mutation. In some embodiments, the target DNA sequence comprises a G→A point mutation associated with a disease or disorder, and wherein the deamination of the mutant A base results in a sequence that is not associated with a disease or disorder. In some embodiments, the target DNA sequence comprises a T→C point mutation associated with a disease or disorder, and wherein the deamination of the mutant C base results in a sequence that is not associated with a disease or disorder.

[0463] In some embodiments, the target DNA sequence encodes a protein, and the point mutation is in a codon and results in a change in the amino acid encoded by the mutant codon as compared to the wild-type codon. In some embodiments, the deamination of the mutant A results in a change of the amino acid encoded by the mutant codon. In some embodiments, the deamination of the mutant A results in the codon encoding the wild-type amino acid. In some embodiments, the deamination of the mutant C results in a change of the amino acid encoded by the mutant codon. In some embodiments, the deamination of the mutant C results in the codon encoding the wild-type amino acid. In some embodiments, the subject has or has been diagnosed with a disease or disorder.

[0464] In some embodiments, the adenosine deaminases provided herein are capable of deaminating adenine of a deoxyadenosine residue of DNA. Other aspects of the disclosure provide fusion proteins that comprise an adenosine deaminase (e.g., an adenosine deaminase that deaminates deoxyadenosine in DNA as described herein) and a domain (e.g., a Cas9 or a Cpf1 protein) capable of binding to a specific nucleotide sequence. For example, the adenosine can be converted to an inosine residue, which typically base pairs with a cytosine residue. Such fusion proteins are useful inter alia for targeted editing of nucleic acid sequences. Such fusion proteins can be used for targeted editing of DNA in vitro, e.g., for the generation of mutant cells or animals; for the introduction of targeted mutations, e.g., for the correction of genetic defects in cells ex vivo, e.g., in cells obtained from a subject that are subsequently re-introduced into the same or another subject; and for the introduction of targeted mutations in vivo, e.g., the correction of genetic defects or the introduction of deactivating mutations in disease-associated genes in a G to A, or a T to C to mutation can be treated using the nucleobase editors provided herein. The present disclosure provides deaminases, fusion proteins, nucleic acids, vectors, cells, compositions, methods, kits, systems, etc. that utilize the deaminases and nucleobase editors.

### Use of Nucleobase Editors to Target Nucleotides in the SERPINA1 Gene

[0465] The suitability of nucleobase editors that target a nucleotide in the SERPINA1 gene is evaluated as described herein. In one embodiment, a single cell of interest is transfected, transduced, or otherwise modified with a nucleic acid molecule or molecules encoding a nucleobase editor described herein together with a small amount of a vector encoding a reporter (e.g., GFP). These cells can be immortalized human cell lines, such as 293T, K562 or U20S. Alternatively, primary human cells may be used. Cells may also be obtained from a subject or individual, such as from tissue biopsy, surgery, blood, plasma, serum, or other biological fluid. Such cells may be relevant to the eventual cell target,

[0466] Delivery may be performed using a viral vector as further described below. In one embodiment, transfection may be performed using lipid transfection (such as Lipofectamine or Fugene) or by electroporation. Following transfection, expression of GFP can be determined either by fluorescence microscopy or by flow cytometry to confirm consistent and high levels of transfection. These preliminary transfections can comprise different nucleobase editors to determine which combinations of editors give the greatest activity.

[0467] The activity of the nucleobase editor is assessed as described herein, i.e., by sequencing the target gene to detect alterations in the target sequence. For Sanger sequencing, purified PCR amplicons are cloned into a plasmid backbone, transformed, miniprepped and sequenced with a single primer. Sequencing may also be performed using next generation sequencing techniques. When using next generation sequencing, amplicons may be 300-500 bp with the intended cut site placed asymmetrically. Following PCR, next generation sequencing adapters and barcodes (for example Illumina multiplex adapters and indexes) may be added to the ends of the amplicon, e.g., for use in high throughput sequencing (for example on an Illumina MiSeq).

[0468] The fusion proteins that induce the greatest levels of target specific alterations in initial tests can be selected for further evaluation.

[0469] In particular embodiments, the nucleobase editors are used to target polynucleotides of interest. In one embodiment, a nucleobase editor of the invention is delivered to cells (e.g., hepatocytes) in conjunction with a guide RNA that is used to target a nucleic acid sequence, e.g., a SERPINA1 polynucleotide harboring AIAD-associated mutations, thereby altering the target gene, i.e., SERPINA1.

[0470] In some embodiments, a base editor is targeted by a guide RNA to introduce one or more edits to the sequence of a gene of interest. In some embodiments, the one or more alterations introduced into the SERPINA1 or SERPINC1 gene are as presented in Tables 3A and 3B infra.

### Generating an Intended Mutation

[0471] In some embodiments, the purpose of the methods provided herein is to restore the function of a dysfunctional gene via gene editing. In some embodiments, the function of a dysfunctional gene is restored by introducing an intended mutation. The nucleobase editing proteins provided herein can be validated for gene editing-based human therapeutics in vitro, e.g., by correcting a disease-associated mutation in human cell culture. It will be understood by the skilled artisan that the nucleobase editing proteins provided herein, e.g., the fusion proteins comprising a polynucleotide programmable nucleotide binding domain (e.g., Cas9) and a nucleobase editing domain (e.g., an adenosine deaminase domain or a cytidine deaminase domain) can be used to correct any single point A to G or C to T mutation. In the first case, deamination of the mutant A to I corrects the mutation, and in the latter case, deamination of the A that is base-paired with the mutant T, followed by a round of replication, corrects the mutation.

[0472] In some embodiments, the present disclosure provides base editors that can efficiently generating an intended mutation, such as a point mutation, in a nucleic acid (e.g., a nucleic acid within a genome of a subject) without generating a significant number of unintended mutations, such as unintended point mutations. In some embodiments, an intended mutation is a mutation that is generated by a specific base editor (e.g., cytidine base editor or adenosine base editor) bound to a guide polynucleotide (e.g., gRNA), specifically designed to generate the intended mutation. In some embodiments, the intended mutation is a mutation associated with a disease or disorder. In some embodiments, the intended mutation is an adenine (A) to guanine (G) point mutation associated with a disease or disorder. In some embodiments, the intended mutation is a cytosine (C) to thymine (T) point mutation associated with a disease or disorder. In some embodiments, the intended mutation is an adenine (A) to guanine (G) point mutation within the coding region or non-coding region of a gene. In some embodiments, the intended mutation is a cytosine (C) to thymine (T) point mutation within the coding region or non-coding region of a gene. In some embodiments, the intended mutation is a point mutation that generates a stop codon, for example, a premature stop codon within the coding region of a gene. In some embodiments, the intended mutation is a mutation that eliminates a stop codon.

[0473] In some embodiments, any of the base editors provided herein are capable of generating a ratio of intended mutations to unintended mutations (e.g., intended point mutations: unintended point mutations) that is greater than 1:1. In some embodiments, any of the base editors provided herein are capable of generating a ratio of intended mutations to unintended mutations (e.g., intended point mutations:unintended point mutations) that is at least 1.5:1, at least 2:1, at least 2.5:1, at least 3:1, at least 3.5:1, at least 4:1, at least 4.5:1, at least 5:1, at least 5.5:1, at least 6:1, at least 6.5:1, at least 7:1, at least 7.5:1, at least 8:1, at least 10:1, at least 12:1, at least 15:1, at least 20:1, at least 25:1, at least 30:1, at least 40:1, at least 50:1, at least 100:1, at least 150:1, at least 200:1, at least 250:1, at least 500:1, or at least 1000:1, or more

[0474] Details of base editor efficiency are described in International PCT Application Nos. PCT/2017/045381 (WO2018/027078) and PCT/US2016/058344 (WO2017/070632), each of which is incorporated herein by reference for its entirety. Also see Komor, A. C., et al., “Programmable editing of a target base in genomic DNA without double-stranded DNA cleavage” Nature 533, 420-424 (2016); Gaudelli, N. M., et al., “Programmable base editing of A⋅T to G⋅C in genomic DNA without DNA cleavage” Nature 551, 464-471 (2017); and Komor, A C., et al., “Improved base excision repair inhibition and bacteriophage Mu Gam protein yields C:G-to-T:A base editors with higher efficiency and product purity” Science Advances 3:eaao4774 (2017), the entire contents of which are hereby incorporated by reference.

[0475] In some embodiments, the editing of the plurality of nucleobase pairs in one or more genes result in formation of at least one intended mutation. In some embodiments, the formation of the at least one intended mutation results in a precise correction of a disease causing mutation. It should be appreciated that the characteristics of the multiplex editing of the base editors as described herein can be applied to any of combination of the methods of using the base editor provided herein.

### Precise Correction of Pathogenic Mutations

[0476] In some embodiments, the intended mutation is a precise correction of a pathogenic mutation or a disease-causing mutation in a gene associated with a disease or pathology. The pathogenic mutation can be a pathogenic single nucleotide polymorphism (SNP) or can be caused by a SNP. For example, the pathogenic mutation can be an amino acid change in a protein encoded by a gene. In another example, the pathogenic mutation can be a pathogenic SNP in a gene. The precise correction can revert the pathogenic mutation back to its wild-type state. In some embodiments, the pathogenic mutation is a G→A point mutation associated with a disease or disorder, wherein the deamination of the mutant A base with an A-to-G base editor (ABE) results in a sequence that is not associated with a disease or disorder. In some embodiments, the pathogenic mutation is a C→T point mutation. The C→T point mutation can be corrected, for example, by targeting an A-to-G base editor (ABE) to the opposite strand and editing the complement A of the pathogenic T nucleobase. In some embodiments, the pathogenic mutation is a T→C point mutation associated with a disease or disorder, and wherein the deamination of the mutant C base with a C-to-T base editor (BE or CBE) results in a sequence that is not associated with a disease or disorder. In some embodiments, the pathogenic mutation is an A→G point mutation. The A→G point mutation can be corrected, for example, by targeting a CBE to the opposite strand and editing the complement C of the pathogenic G nucleobase. Non-limiting exemplary pathogenic mutations or disease-causing mutations are listed in Tables 3A and 3B herein, along with the base editor that can be used to correct the mutation by editing the pathogenic mutation back to its wild-type state. The indicated base editor can be targeted to a pathogenic SNP, or to the complement of the pathogenic SNP. Details of the nomenclature of the description of mutations and other sequence variations are described in den Dunnen, J. T. and Antonarakis, S. E., “Mutation Nomenclature Extensions and Suggestions to Describe Complex Mutations: A Discussion.” Human Mutation 15:712 (2000), the entire contents of which are incorporated by reference herein.

TABLE 3A
Precise correction of pathogenic mutations in
SERPINA1 or SERPINC1 genes

| | Patho- | | SEQ | | |
|---|---|---|---|---|---|
| | genic | Base | ID | gRNA Targeting | |
| Gene | Mutation | Editor | NO: | Sequence | PAM |
| SERPINA1 | E342K | ABE | 140 | GACAAGAAAGGGACUGAAGC | NGC |
| SERPINA1 | E342K | ABE | 141 | AUCGACAAGAAAGGGACUGA | NGC |
| SERPINC1 | R48C | ABE | 142 | ACACACCGGUUGGUGGCCUC | NGG |
| | (R79C) | | | | |

TABLE 3B
Precise correction of pathogenic mutations in disease-associated genes

| | | | SEQ | | |
|---|---|---|---|---|---|
| | Pathogenic | Base | ID | | |
| Gene | Mutation | Editor | NO: | gRNA Targeting Sequence | PAM |
| ABCA4 | A1038V | ABE | 143 | CUCCAGCUGGACCUCCUCCU | GGG |
| ABCA4 | A1038V | ABE | 144 | UCCCAGGAGGAGGUCCAGCU | NGA |
| ABCA4 | L541P | CBE | 145 | CUCUCCACUGGAGGAAAACA | NGT |
| ABCA4 | G1961E | ABE | 146 | CUGUGUGUCGAAGUUCGCCC | TGG |
| ABCA4 | G1961E | ABE | 147 | UGUGUGUCGAAGUUCGCCCU | GGAG |
| ABCA4 | G1961E | ABE | 148 | GUCGAAGUUCGCCCUGGAGA | NGT |
| ABCA4 | G1961E | ABE | 149 | UGUCGAAGUUCGCCCUGGAG | NGG |
| ABCC6 | R1141* | ABE | 150 | GUUCAGAAUGCCCGGACCAC | NGT |
| ACADM | K329E | CBE | 151 | UCAACUUCCAUUGCCAUUUC | NGC |
| ACADM | K329E | CBE | 152 | CUUCCAUUGCCAUUUCAGCC | NGC |
| ADA | G216R | ABE | 153 | GCCAGGGAGGUGGGCUCGGC | NGA |
| ADA | G216R | ABE | 154 | CCACGCCAGGGAGGUGGGCU | NGG |
| ADA | Q3* | ABE | 155 | UCUAGGCCAUGGUGCCCUCG | NGCG |
| AGXT | G170R | ABE | 156 | GCUUCAGGGAACUCUGCCAC | NGG |
| ARH | Q136* | ABE | 157 | UGCUAGCUCUGGGCGAUGU | NGC |
| | | | | A | |
| ARSA | P426L | ABE | 158 | GCAGGGGCUCAUGAGCAGUC | NGA |
| ARSB | Y210C | CBE | 159 | GAACACAUAUUUUUAUAUC | NGT |
| | | | | C | |
| ASS | G390R | ABE | 160 | AUGCCACCAGGUUCAUCAAC | NNNRR |
| | | | | | T |
| ATP2A2 | N767S | CBE | 161 | CGCUGGACGAGAUGAGGUA | NGG |
| | | | | G | |
| ATP2A2 | N767S | CBE | 162 | CCCCGACGCUGGACGAGAUG | NGG |
| ATP2A2 | N767S | CBE | 163 | ACGCUGGACGAGAUGAGGU | NNGRR |
| | | | | A | T |
| CBS | T191M | ABE | 164 | GUGGGCAUCCUCACAAUCUC | NGC |
| CFTR | G551D | ABE | 165 | CUGAGUGGAGAUCAACGAG | NNGRR |
| | | | | C | T |
| CFTR | W1282* | ABE | 166 | CAACAGUGAAGGAAAGCCU | NGG |
| | | | | U | |
| CFTR | R553* | ABE | 167 | GCUCAUUGACCUCCACUCAG | NNNRR |
| | | | | | T |
| CFTR | R117H | ABE | 168 | CACUCUAUCGCGAUUUAUCU | NGG |
| CHM | R270* | ABE | 169 | CUCAUCCUUCUCGAAAUGCA | NGA |
| CHM | A117A | CBE | 170 | CUGCAGCGCACCAGCUUCUU | NGA |
| CLN2 | R208* | ABE | 171 | UAUCACUUACGGAUCACAGA | NGG |
| COCH | G88E | ABE | 172 | GGGAACCUGUACGAGUCUA | NGC |
| | | | | U | |
| CPT2 | S113L | ABE | 173 | UACCCAAAAUGUAGCUUGU | NGT |
| | | | | A | |
| CX30 | T5M | ABE | 174 | UGCAGCAUCCCCCAAUCCAU | NGCG |
| DFNB59 | R183W | ABE | 175 | UUACCCACAUUGCUUCCCCU | NGA |
| E47 | E555K | ABE | 176 | GCGGAAGCGGGUGCGCGUGC | NGG |
| F11 | E117* | ABE | 177 | UUGGCAUUAUUGAGCACUC | NGG |
| | | | | U | |
| F11 | F283L | CBE | 178 | UGAUCUCUUGGGAGAAGAA | NGG |
| | | | | C | |
| F5 | R506Q | ABE | 179 | GGCAAGGAAUACAGGUAUU | NGT |
| | | | | U | |
| F5 | R534Q | CBE | 180 | UCCUCGCCUGUCCAGGGAUC | NGC |
| F7 | A294V | ABE | 181 | GAGCUCCAGGACCGUGGCGC | NNNRR |
| | | | | | T |
| F7 | C310F | ABE | 182 | GCAGGAAGUCCUGGGUCAUC | NGC |
| F7 | R304Q | ABE | 183 | CGUGCCCCAGCUGAUGACCC | NGG |
| F7 | Q100R | CBE | 184 | GCAGUACCGCUCACAGCCGC | NGT |
| F8 | R2178C | ABE | 185 | GUGCAAAUGCUAUAAUGAG | NGG |
| | | | | U | |
| F8 | R550C | ABE | 186 | UAAUAGCAGGUCAGGCACCG | NGG |
| F9 | T342M | ABE | 187 | AUGUUCAUGUAUUCCUUGU | NNNRR |
| | | | | C | T |
| F9 | R294Q | ABE | 188 | AGCAAAAGCAAAAUGUGAU | NGA |
| | | | | U | |
| F9 | G106S | ABE | 189 | AAUGGCAGCAGUUGCAAGG | NGA |
| | | | | A | |
| F9 | A279T | ABE | 190 | GUUGUCACAGGUAAAUACA | NGA |
| | | | | C | |
| F9 | R294* | ABE | 191 | CAUUUCACUUUUGCUCUGUA | NGT |
| F9 | R379Q | ABE | 192 | UUGACCAAGCCACAUGUCUU | NGA |
| FAH | P261L | ABE | 193 | CACCACCCACAGAGAGACAG | NGG |
| FGF23 | R176Q | ABE | 194 | CGGCAGCACACCCGGAGCGC | NGA |
| G6PC | Q347* | ABE | 195 | GACCUAGGCGAGGCAGUAG | NGA |
| | | | | G | |
| G6PC | Q347* | ABE | 196 | GGACCUAGGCGAGGCAGUA | NGG |
| | | | | G | |
| G6PC | Q347* | ABE | 197 | AGGACCUAGGCGAGGCAGU | NNGRR |
| | | | | A | T |
| G6PC | R83C | ABE | 198 | CAGUAUGGACACUGUCCAAA | NNGRR |
| | | | | | T |
| G6PD | S188F | ABE | 199 | GGAGAAGAUGUGGUUGGAC | NNNRR |
| | | | | A | T |
| GALNS | R386C | ABE | 200 | UCGCCACAGUAAUAGAAGA | NGG |
| | | | | U | |
| GALT | Q188R | CBE | 201 | UUACCCGGCAGUGGGGGUG | NGG |
| | | | | G | |
| GBA | N370S | CBE | 202 | UACAGGAGGCUCUAGGGUA | NGA |
| | | | | A | |
| GBA | N370S | CBE | 203 | AGGCUCUAGGGUAAGGACA | NGG |
| | | | | A | |
| GBA | L444P | CBE | 204 | AACGACCCGGACGCAGUGGC | NNNRR |
| | | | | | T |
| GBA | L444P | CBE | 205 | CGACCCGGACGCAGUGGCAC | NGA |
| GCDH | M263V | ABE | 206 | GAUGAUCACGCCUGUGGCUG | NGG |
| GCDH | R402W | ABE | 207 | GUGCCAGAUCACGUGAUACU | NGT |
| GLDC | A389V | ABE | 208 | AUUCACCAAGAGGGCCUAAA | NGA |
| GLDC | G771R | ABE | 209 | CCCAUCAGAGUGUAAGUUCU | NGG |
| GLDC | T269M | ABE | 210 | CCCCUCCAUGUCUGGGUACU | NGA |
| GUCY2D | R838C | ABE | 211 | GCACACGGAGGAGCUGGAGC | NGG |
| GUSB | L175F | ABE | 212 | GUGAAUGUGUUGUUGAUGG | NNNRR |
| | | | | C | T |
| HBB | E26K | ABE | 213 | UUGGUGGUAAGGCCCUGGG | NGG |
| | | | | C | |
| HBB | E26K | ABE | 214 | UGGUAAGGCCCUGGGCAGG | NGG |
| | | | | U | |
| HBB | E7K | ABE | 215 | ACUCCUAAGGAGAAGUCUGC | NGT |
| HMBS | R173W | ABE | 216 | GCCAGGUGUUGAGGUUUCCC | NGC |
| HPRT1 | R51* | ABE | 217 | AUCACAUCUCAAGCAAGACG | NNNRR |
| | | | | | T |
| HPRT1 | R170* | ABE | 218 | UUCAUGGGGUCCUUUUCACC | NGC |
| IDS | G374G | ABE | 219 | UUCUCACCUGCCUCCGGAAG | NGA |
| IDUA | Q70* | ABE | 220 | CUGCUAGUCCCAGCUGAGGA | NGT |
| IMPDH1 | D226N | ABE | 221 | ACCAACCUGAAGAAGAACCG | NGA |
| KCNJ2 | R218W | ABE | 222 | UUUUCCAAAGAUUGCCCACU | NGC |
| KRT12 | L132P | CBE | 223 | CAAAAUCCUAAUGAUAGAU | NGC |
| | | | | U | |
| LRRK2 | G2019S | ABE | 224 | ACUACAGCAUUGCUCAGUAC | NGC |
| MECP2 | R106W | ABE | | | |
| MECP2 | R133C | ABE | | | |
| MECP2 | R306C | ABE | | | |
| MECP2 | R168* | ABE | | | |
| MECP2 | R255* | ABE | | | |
| NAGLU | R297* | ABE | 225 | CUCUCACAGGAAGAGGCUCC | NGA |
| NAGLU | Y140C | CBE | 226 | CACGAAAGAGCAGCUUUGCG | NGC |
| OPN1LW | C203R | CBE | 227 | GACUUCACGCGGCCCAGACG | NGT |
| PAH | R408W | ABE | 228 | AAGGGCCAAGGUAUUGUGG | NGC |
| | | | | C | |
| PAH | I65T | CBE | 229 | ACACUGAAUCUAGACCUUCU | NGT |
| PAH | R261Q | ABE | 230 | CUUCCAAGUCUUCCACUGCA | NNNRR |
| | | | | | T |
| PCDH15 | R245* | ABE | 231 | UGGUGGUUCACCUCUCAUUC | AGAT |
| PCDH15 | R245* | ABE | 232 | UGGUGGUGGUUCACCUCUCA | TCAGA |
| | | | | U | T |
| PCDH15 | R245* | ABE | 233 | UUCACCUCUCAUUCAGAUUU | NGG |
| PDE6A | V685M | ABE | 234 | AAAGAUCAUGGAUCAGUCU | NGA |
| | | | | A | |
| PDS | L236P | CBE | 235 | CAGCCAAAGAUUGUCCUCAA | NGT |
| PPOX | R59W | ABE | 236 | UCCCCAAGGUCCAAGCUCAA | NGA |
| PRNP | E200K | ABE | 237 | CACCAAGACCGACGUUAAGA | NGA |
| PRNP | M129V | CBE | 238 | UUCCCAGCACGUAGCCGCCA | NGG |
| PRNP | P102L | ABE | 239 | CUCAGCUUGUUCCACUGACU | NNGRR |
| | | | | | T |
| PRNP | D178N | CBE | 240 | GUGCACAACUGCGUCAAUAU | NNNRR |
| | | | | | T |
| PRPF3 | T494M | ABE | 241 | ACCUUCAUGGGGUCUUGAAC | NGC |
| PRPF8 | H2309R | CBE | 242 | GGGCCUGCGCACCUCGUGGU | NGA |
| RHO | P347L | ABE | 243 | GUCUUAGGCCAGGGCCACCU | NGC |
| RHO | P347L | ABE | 244 | UAGGCCAGGGCCACCUGGCU | NGT |
| RHO | D190N | ABE | 245 | AAUCAACUACUACACGCUCA | NGC |
| RP1 | R667* | ABE | 246 | UCAAGAUUUUUUCUUCUUU | NGC |
| | | | | U | |
| RPE65 | R44* | ABE | 247 | ACAUCAAAGGAGACUGCCGG | NGA |
| RPS19 | R62Q | ABE | 248 | GCGCAGCACCUGUACCUCCG | NGG |
| RS1 | R102W | ABE | 249 | CUGUUGAGCCAGGCCUUGUU | NNNRR |
| | | | | | T |
| RS1 | R141C | ABE | 250 | AUGUCACAGCACCCCUGGGU | NNGRR |
| | | | | | T |
| SERPINA1 | E342K | ABE | 251 | GACAAGAAAGGGACUGAAG | NGC |
| | | | | C | |
| SERPINA1 | E342K | ABE | 252 | AUCGACAAGAAAGGGACUG | NGC |
| | | | | A | |
| SERPINC1 | R48C | ABE | 253 | ACACACCGGUUGGUGGCCUC | NGG |
| | (R79C) | | | | |
| SGSH | R74C | ABE | 254 | GGCGCAGCUGGGAGAGCAGC | NGC |
| SMPD1 | L302P | CBE | 255 | CACCUGUGAGGAAGUUCCUG | NGG |
| SNCA | A53T | ABE | 256 | UGACAACAGGUAAGCUCCAU | NGT |
| SOD1 | A4V | ABE | 257 | CGACCUUCGUCGCCAUAACU | NGC |
| SOD1 | H46R | CBE | 258 | CAUGAACACGGAAUCCAUGC | NGG |
| SOD1 | G37R | ABE | 259 | UAAAAGACUGACUGAAGGC | NGC |
| | | | | C | |
| TECTA | Y1870C | ABE | 260 | UCAUGUAUAAAAACACACUC | NGG |
| TTR | V50M/V30M | ABE | 261 | GGCCAUGCAUGUGUUCAGA | NGG |
| | | | | A | |
| USH1C | V72V | ABE | 262 | CCAGGUAGAAUAUGAUCAG | NGA |
| | | | | C | |
| USH2a | C759F | ABE | 263 | GGAUUGAAGAAUUUGUUCA | NGA |
| | | | | C | |
| MTM1 | c.1261- | CBE | 264 | AACUGAUGAAGAUAAUUUG | NNNRR |
| | 10A > G | | | U | T |
| PAH | IVS10- | ABE | 265 | UCACUUAGGGCCUACAGUAC | NGC |
| | 11G > A | | | | |
| PDS | IVS8, +1 | ABE | 266 | GGGAUGAGUGUGGUGUUCC | NNNRR |
| | G > A | | | U | T |
| ARSA | C.459 + 1G > A | ABE | 267 | CGACCAGAUAGGAACCACCC | NGG |

* is a stop codon.

[0477] In some embodiments, the disease or disorder is alpha-1 antitrypsin deficiency (A1AD). In some embodiments, the pathogenic mutation is in the SERPINA1 gene which encodes the A1AT protein. In some embodiments, the mutation of the SERPINA1-encoded A1AT protein is E342K (PiZ allele) (FIG. 3A). In some embodiments, the nucleobase “A” at position 7 of the SERPINA1 allele is edited to “G” to restore the PiZ allele to a wild type allele. (FIGS. 3B and 3C).

### Delivery System

[0478] A base editor disclosed herein can be encoded on a nucleic acid that is contained in a viral vector. Viral vectors can include lentivirus, Adenovirus, Retrovirus, and Adeno-associated viruses (AAVs). Viral vectors can be selected based on the application. For example, AAVs are commonly used for gene delivery in vivo due to their mild immunogenicity. Adenoviruses are commonly used as vaccines because of the strong immunogenic response they induce. Packaging capacity of the viral vectors can limit the size of the base editor that can be packaged into the vector. For example, the packaging capacity of the AAVs is ˜4.5 kb including two 145 base inverted terminal repeats (ITRs).

[0479] AAV is a small, single-stranded DNA dependent virus belonging to the parvovirus family. The 4.7 kb wild-type (wt) AAV genome is made up of two genes that encode four replication proteins and three capsid proteins, respectively, and is flanked on either side by 145-bp inverted terminal repeats (ITRs). The virion is composed of three capsid proteins, Vp1, Vp2, and Vp3, produced in a 1:1:10 ratio from the same open reading frame but from differential splicing (Vp1) and alternative translational start sites (Vp2 and Vp3, respectively). Vp3 is the most abundant subunit in the virion and participates in receptor recognition at the cell surface defining the tropism of the virus. A phospholipase domain, which functions in viral infectivity, has been identified in the unique N terminus of Vp1.

[0480] Similar to wt AAV, recombinant AAV (rAAV) utilizes the cis-acting 145-bp ITRs to flank vector transgene cassettes, providing up to 4.5 kb for packaging of foreign DNA. Subsequent to infection, rAAV can express a fusion protein of the invention and persist without integration into the host genome by existing episomally in circular head-to-tail concatemers. Although there are numerous examples of rAAV success using this system, in vitro and in vivo, the limited packaging capacity has limited the use of AAV-mediated gene delivery when the length of the coding sequence of the gene is equal or greater in size than the wt AAV genome.

[0481] The small packaging capacity of AAV vectors makes the delivery of a number of genes that exceed this size and/or the use of large physiological regulatory elements challenging. These challenges can be addressed, for example, by dividing the protein(s) to be delivered into two or more fragments, wherein the N-terminal fragment is fused to a split intein-N and the C-terminal fragment is fused to a split intein-C. These fragments are then packaged into two or more AAV vectors. As used herein, “intein” refers to a self-splicing protein intron (e.g., peptide) that ligates flanking N-terminal and C-terminal exteins (e.g., fragments to be joined). The use of certain inteins for joining heterologous protein fragments is described, for example, in Wood et al., J. Biol. Chem. 289(21); 14512-9 (2014). For example, when fused to separate protein fragments, the inteins IntN and IntC recognize each other, splice themselves out and simultaneously ligate the flanking N- and C-terminal exteins of the protein fragments to which they were fused, thereby reconstituting a full-length protein from the two protein fragments. Other suitable inteins will be apparent to a person of skill in the art.

[0482] A fragment of a fusion protein of the invention can vary in length. In some embodiments, a protein fragment ranges from 2 amino acids to about 1000 amino acids in length. In some embodiments, a protein fragment ranges from about 5 amino acids to about 500 amino acids in length. In some embodiments, a protein fragment ranges from about 20 amino acids to about 200 amino acids in length. In some embodiments, a protein fragment ranges from about 10 amino acids to about 100 amino acids in length. Suitable protein fragments of other lengths will be apparent to a person of skill in the art.

[0483] In some embodiments, a portion or fragment of a nuclease (e.g., Cas9) is fused to an intein. The nuclease can be fused to the N-terminus or the C-terminus of the intein. In some embodiments, a portion or fragment of a fusion protein is fused to an intein and fused to an AAV capsid protein. The intein, nuclease and capsid protein can be fused together in any arrangement (e.g., nuclease-intein-capsid, intein-nuclease-capsid, capsid-intein-nuclease, etc.). In some embodiments, the N-terminus of an intein is fused to the C-terminus of a fusion protein and the C-terminus of the intein is fused to the N-terminus of an AAV capsid protein.

[0484] In one embodiment, dual AAV vectors are generated by splitting a large transgene expression cassette in two separate halves (5′ and 3′ ends, or head and tail), where each half of the cassette is packaged in a single AAV vector (of <5 kb). The re-assembly of the full-length transgene expression cassette is then achieved upon co-infection of the same cell by both dual AAV vectors followed by: (1) homologous recombination (HR) between 5′ and 3′ genomes (dual AAV overlapping vectors); (2) ITR-mediated tail-to-head concatemerization of 5′ and 3′ genomes (dual AAV trans-splicing vectors); or (3) a combination of these two mechanisms (dual AAV hybrid vectors). The use of dual AAV vectors in vivo results in the expression of full-length proteins. The use of the dual AAV vector platform represents an efficient and viable gene transfer strategy for transgenes of >4.7 kb in size.

[0485] The disclosed strategies for designing base editors can be useful for generating base editors capable of being packaged into a viral vector. The use of RNA or DNA viral based systems for the delivery of a base editor takes advantage of highly evolved processes for targeting a virus to specific cells in culture or in the host and trafficking the viral payload to the nucleus or host cell genome. Viral vectors can be administered directly to cells in culture, patients (in vivo), or they can be used to treat cells in vitro, and the modified cells can optionally be administered to patients (ex vivo). Conventional viral based systems could include retroviral, lentivirus, adenoviral, adeno-associated and herpes simplex virus vectors for gene transfer. Integration in the host genome is possible with the retrovirus, lentivirus, and adeno-associated virus gene transfer methods, often resulting in long term expression of the inserted transgene. Additionally, high transduction efficiencies have been observed in many different cell types and target tissues.

[0486] The tropism of a retrovirus can be altered by incorporating foreign envelope proteins, expanding the potential target population of target cells. Lentiviral vectors are retroviral vectors that are able to transduce or infect non-dividing cells and typically produce high viral titers. Selection of a retroviral gene transfer system would therefore depend on the target tissue. Retroviral vectors are comprised of cis-acting long terminal repeats with packaging capacity for up to 6-10 kb of foreign sequence. The minimum cis-acting LTRs are sufficient for replication and packaging of the vectors, which are then used to integrate the therapeutic gene into the target cell to provide permanent transgene expression. Widely used retroviral vectors include those based upon murine leukemia virus (MuLV), gibbon ape leukemia virus (GaLV), Simian Immuno deficiency virus (SIV), human immuno deficiency virus (HIV), and combinations thereof (See, e.g., Buchscher et al., J. Virol. 66:2731-2739 (1992); Johann et al., J. Virol. 66:1635-1640 (1992); Sommnerfelt et al., Virol. 176:58-59 (1990); Wilson et al., J. Virol. 63:2374-2378 (1989); Miller et al., J. Virol. 65:2220-2224 (1991); PCT/US94/05700).

[0487] Retroviral vectors, especially lentiviral vectors, can require polynucleotide sequences smaller than a given length for efficient integration into a target cell. For example, retroviral vectors of length greater than 9 kb can result in low viral titers compared with those of smaller size. In some aspects, a base editor of the present disclosure is of sufficient size so as to enable efficient packaging and delivery into a target cell via a retroviral vector. In some cases, a base editor is of a size so as to allow efficient packing and delivery even when expressed together with a guide nucleic acid and/or other components of a targetable nuclease system.

[0488] In applications where transient expression is preferred, adenoviral based systems can be used. Adenoviral based vectors are capable of very high transduction efficiency in many cell types and do not require cell division. With such vectors, high titer and levels of expression have been obtained. This vector can be produced in large quantities in a relatively simple system. Adeno-associated virus (“AAV”) vectors can also be used to transduce cells with target nucleic acids, e.g., in the in vitro production of nucleic acids and peptides, and for in vivo and ex vivo gene therapy procedures (See, e.g., West et al., Virology 160:38-47 (1987); U.S. Pat. No. 4,797,368; WO 93/24641; Kotin, Human Gene Therapy 5:793-801 (1994); Muzyczka, J. Clin. Invest. 94:1351 (1994). The construction of recombinant AAV vectors is described in a number of publications, including U.S. Pat. No. 5,173,414; Tratschin et al., Mol. Cell. Biol. 5:3251-3260 (1985); Tratschin, et al., Mol. Cell. Biol. 4:2072-2081 (1984); Hermonat & Muzyczka, PNAS 81:6466-6470 (1984); and Samulski et al., J. Virol. 63:03822-3828 (1989).

[0489] A base editor described herein can therefore be delivered with viral vectors. One or more components of the base editor system can be encoded on one or more viral vectors. For example, a base editor and guide nucleic acid can be encoded on a single viral vector. In other cases, the base editor and guide nucleic acid are encoded on different viral vectors. In either case, the base editor and guide nucleic acid can each be operably linked to a promoter and terminator.

[0490] The combination of components encoded on a viral vector can be determined by the cargo size constraints of the chosen viral vector.

### Non-Viral Delivery of Base Editors

[0491] Non-viral delivery approaches for base editors are also available. One important category of non-viral nucleic acid vectors are nanoparticles, which can be organic or inorganic. Nanoparticles are well known in the art. Any suitable nanoparticle design can be used to deliver genome editing system components or nucleic acids encoding such components. For instance, organic (e.g. lipid and/or polymer) nanoparticles can be suitable for use as delivery vehicles in certain embodiments of this disclosure. Exemplary lipids for use in nanoparticle formulations, and/or gene transfer are shown in Table 4 (below).

TABLE 4
Lipids Used for Gene Transfer

| Lipid | Abbreviation | Feature |
|---|---|---|
| 1,2-Dioleoyl-sn-glycero-3-phosphatidylcholine | DOPC | Helper |
| 1,2-Dioleoyl-sn-glycero-3- | DOPE | Helper |
| phosphatidylethanolamine | | |
| Cholesterol | | Helper |
| N-[1-(2,3-Dioleyloxy)prophyl]N,N,N- | DOTMA | Cationic |
| trimethylammonium chloride | | |
| 1,2-Dioleoyloxy-3-trimethylammonium- | DOTAP | Cationic |
| propane | | |
| Dioctadecylamidoglycylspermine | DOGS | Cationic |
| N-(3-Aminopropyl)-N,N-dimethyl-2,3- | GAP-DLRIE | Cationic |
| bis(dodecyloxy)-1-propanaminium bromide | | |
| Cetyltrimethylammonium bromide | CTAB | Cationic |
| 6-Lauroxyhexyl ornithinate | LHON | Cationic |
| 1-(2,3-Dioleoyloxypropyl)-2,4,6- | 2Oc | Cationic |
| trimethylpyridinium | | |
| 2,3-Dioleyloxy-N-[2(sperminecarboxamido- | DOSPA | Cationic |
| ethyl]-N,N-dimethyl-1-propanaminium | | |
| trifluoroacetate | | |
| 1,2-Dioleyl-3-trimethylammonium-propane | DOPA | Cationic |
| N-(2-Hydroxyethyl)-N,N-dimethyl-2,3- | MDRIE | Cationic |
| bis(tetradecyloxy)-1-propanaminium bromide | | |
| Dimyristooxypropyl dimethyl hydroxyethyl | DMRI | Cationic |
| ammonium bromide | | |
| 3β-[N-(N′,N′-Dimethylaminoethane)- | DC-Chol | Cationic |
| carbamoyl]cholesterol | | |
| Bis-guanidium-tren-cholesterol | BGTC | Cationic |
| 1,3-Diodeoxy-2-(6-carboxy-spermyl)- | DOSPER | Cationic |
| propylamide | | |
| Dimethyloctadecylammonium bromide | DDAB | Cationic |
| Dioctadecylamidoglicylspermidin | DSL | Cationic |
| rac-[(2,3-Dioctadecyloxypropyl)(2- | CLIP-1 | Cationic |
| hydroxyethyl)]-dimethylammonium chloride | | |
| rac-[2(2,3-Dihexadecyloxypropyl- | CLIP-6 | Cationic |
| oxymethyloxy)ethyl]trimethylammoniun | | |
| bromide | | |
| Ethyldimyristoylphosphatidylcholine | EDMPC | Cationic |
| 1,2-Distearyloxy-N,N-dimethyl-3- | DSDMA | Cationic |
| aminopropane | | |
| 1,2-Dimyristoyl-trimethylammonium propane | DMTAP | Cationic |
| O,O′-Dimyristyl-N-lysyl aspartate | DMKE | Cationic |
| 1,2-Distearoyl-sn-glycero-3- | DSEPC | Cationic |
| ethylphosphocholine | | |
| N-Palmitoyl D-erythro-sphingosyl carbamoyl- | CCS | Cationic |
| spermine | | |
| N-t-Butyl-N0-tetradecyl-3- | diC14- | Cationic |
| tetradecylaminopropionamidine | amidine | |
| Octadecenolyoxy[ethyl-2-heptadecenyl-3 | DOTIM | Cationic |
| hydroxyethyl] imidazolinium chloride | | |
| N1-Cholesteryloxycarbonyl-3,7-diazanonane- | CDAN | Cationic |
| 1,9-diamine | | |
| 2-(3-[Bis(3-amino-propyl)- | RPR209120 | Cationic |
| amino]propylamino)-N- | | |
| ditetradecylcarbamoylme-ethyl-acetamide | | |
| 1,2-dilinoleyloxy-3-dimethylaminopropane | DLinDMA | Cationic |
| 2,2-dilinoleyl-4-dimethylaminoethyl-[1,3]- | DLin-KC2- | Cationic |
| dioxolane | DMA | |
| dilinoleyl-methyl-4-dimethylaminobutyrate | DLin-MC3- | Cationic |
| | DMA | |

Table 5 lists exemplary polymers for use in gene transfer and/or nanoparticle formulations.

TABLE 5
Polymers Used for Gene Transfer

| Polymer | Abbreviation |
|---|---|
| Poly(ethylene)glycol | PEG |
| Polyethylenimine | PEI |
| Dithiobis (succinimidylpropionate) | DSP |
| Dimethyl-3,3′-dithiobispropionimidate | DTBP |
| Poly(ethylene imine)biscarbamate | PEIC |
| Poly(L-lysine) | PLL |
| Histidine modified PLL | |
| Poly(N-vinylpyrrolidone) | PVP |
| Poly(propylenimine) | PPI |
| Poly(amidoamine) | PAMAM |
| Poly(amidoethylenimine) | SS-PAEI |
| Triethylenetetramine | TETA |
| Poly(β-aminoester) | |
| Poly(4-hydroxy-L-proline ester) | PHP |
| Poly(allylamine) | |
| Poly(α-[4-aminobutyl]-L-glycolic acid) | PAGA |
| Poly(D,L-lactic-co-glycolic acid) | PLGA |
| Poly(N-ethyl-4-vinylpyridinium bromide) | |
| Poly(phosphazene)s | PPZ |
| Poly(phosphoester)s | PPE |
| Poly(phosphoramidate)s | PPA |
| Poly(N-2-hydroxypropylmethacrylamide) | pHPMA |
| Poly (2-(dimethylamino)ethyl methacrylate) | pDMAEMA |
| Poly(2-aminoethyl propylene phosphate) | PPE-EA |
| Chitosan | |
| Galactosylated chitosan | |
| N-Dodacylated chitosan | |
| Histone | |
| Collagen | |
| Dextran-spermine | D-SPM |

Table 6 summarizes delivery methods for a polynucleotide encoding a fusion protein described herein.

TABLE 6

| | | Delivery | | | |
|---|---|---|---|---|---|
| | | into | | | |
| | | Non- | Duration | | Type of |
| | | Dividing | of | Genome | Molecule |
| Delivery | Vector/Mode | Cells | Expression | Integration | Delivered |
| Physical | (e.g.. | YES | Transient | NO | Nucleic |
| | electroporation, | | | | Acids |
| | particle gun, | | | | and |
| | Calcium | | | | Proteins |
| | Phosphate | | | | |
| | transfection | | | | |
| Viral | Retrovirus | NO | Stable | YES | RNA |
| | Lentivirus | YES | Stable | YES/NO | RNA |
| | | | | with | |
| | | | | modification | |
| | Adenovirus | YES | Transient | NO | DNA |
| | Adeno- | YES | Stable | NO | DNA |
| | Associated | | | | |
| | Virus (AAV) | YES | Very | NO | DNA |
| | Vaccinia Virus | | Transient | | |
| | Herpes Simplex | YES | Stable | NO | DNA |
| | Virus | | | | |
| Non-Viral | Cationic | YES | Transient | Depends on | Nucleic |
| | Liposomes | | | what is | Acids |
| | | | | delivered | and |
| | | | | | Proteins |
| | Polymeric | YES | Transient | Depends on | Nucleic |
| | Nanoparticles | | | what is | Acids |
| | | | | delivered | and |
| | | | | | Proteins |
| Biological | Attenuated | YES | Transient | NO | Nucleic |
| Non-Viral | Bacteria | | | | Acids |
| Delivery | Engineered | YES | Transient | NO | Nucleic |
| Vehicles | | | | | Acids |
| | Bacteriophages | YES | Transient | NO | Nucleic |
| | Mammalian | | | | Acids |
| | Virus-like | | | | |
| | Particles | | | | |
| | Biological | YES | Transient | NO | Nucleic |
| | liposomes: | | | | Acids |
| | Erythrocyte | | | | |
| | Ghosts and | | | | |
| | Exosomes | | | | |

[0492] In another aspect, the delivery of genome editing system components or nucleic acids encoding such components, for example, a nucleic acid binding protein such as, for example, Cas9 or variants thereof, and a gRNA targeting a genomic nucleic acid sequence of interest, may be accomplished by delivering a ribonucleoprotein (RNP) to cells. The RNP comprises the nucleic acid binding protein, e.g., Cas9, in complex with the targeting gRNA. RNPs may be delivered to cells using known methods, such as electroporation, nucleofection, or cationic lipid-mediated methods, for example, as reported by Zuris, J. A. et al., 2015, Nat. Biotechnology, 33(1):73-80. RNPs are advantageous for use in CRISPR base editing systems, particularly for cells that are difficult to transfect, such as primary cells. In addition, RNPs can also alleviate difficulties that may occur with protein expression in cells, especially when eukaryotic promoters, e.g., CMV or EF1A, which may be used in CRISPR plasmids, are not well-expressed. Advantageously, the use of RNPs does not require the delivery of foreign DNA into cells. Moreover, because an RNP comprising a nucleic acid binding protein and gRNA complex is degraded over time, the use of RNPs has the potential to limit off-target effects. In a manner similar to that for plasmid based techniques, RNPs can be used to deliver binding protein (e.g., Cas9 variants) and to direct homology directed repair (HDR).

[0493] A promoter used to drive base editor coding nucleic acid molecule expression can include AAV ITR. This can be advantageous for eliminating the need for an additional promoter element, which can take up space in the vector. The additional space freed up can be used to drive the expression of additional elements, such as a guide nucleic acid or a selectable marker. ITR activity is relatively weak, so it can be used to reduce potential toxicity due to over expression of the chosen nuclease.

[0494] Any suitable promoter can be used to drive expression of the base editor and, where appropriate, the guide nucleic acid. For ubiquitous expression, promoters that can be used include CMV, CAG, CBh, PGK, SV40, Ferritin heavy or light chains, etc. For brain or other CNS cell expression, suitable promoters can include: SynapsinI for all neurons, CaMKIIalpha for excitatory neurons, GAD67 or GAD65 or VGAT for GABAergic neurons, etc. For liver cell expression, suitable promoters include the Albumin promoter. For lung cell expression, suitable promoters can include SP-B. For endothelial cells, suitable promoters can include ICAM. For hematopoietic cells suitable promoters can include IFNbeta or CD45. For Osteoblasts suitable promoters can include OG-2.

[0495] In some cases, a base editor of the present disclosure is of small enough size to allow separate promoters to drive expression of the base editor and a compatible guide nucleic acid within the same nucleic acid molecule. For instance, a vector or viral vector can comprise a first promoter operably linked to a nucleic acid encoding the base editor and a second promoter operably linked to the guide nucleic acid.

[0496] The promoter used to drive expression of a guide nucleic acid can include: Pol III promoters such as U6 or H1 Use of Pol II promoter and intronic cassettes to express gRNA Adeno Associated Virus (AAV).

[0497] A base editor described herein with or without one or more guide nucleic can be delivered using adeno associated virus (AAV), lentivirus, adenovirus or other plasmid or viral vector types, in particular, using formulations and doses from, for example, U.S. Pat. No. 8,454,972 (formulations, doses for adenovirus), U.S. Pat. No. 8,404,658 (formulations, doses for AAV) and U.S. Pat. No. 5,846,946 (formulations, doses for DNA plasmids) and from clinical trials and publications regarding the clinical trials involving lentivirus, AAV and adenovirus. For example, for AAV, the route of administration, formulation and dose can be as in U.S. Pat. No. 8,454,972 and as in clinical trials involving AAV. For Adenovirus, the route of administration, formulation and dose can be as in U.S. Pat. No. 8,404,658 and as in clinical trials involving adenovirus. For plasmid delivery, the route of administration, formulation and dose can be as in U.S. Pat. No. 5,846,946 and as in clinical studies involving plasmids. Doses can be based on or extrapolated to an average 70 kg individual (e.g. a male adult human), and can be adjusted for patients, subjects, mammals of different weight and species. Frequency of administration is within the ambit of the medical or veterinary practitioner (e.g., physician, veterinarian), depending on usual factors including the age, sex, general health, other conditions of the patient or subject and the particular condition or symptoms being addressed. The viral vectors can be injected into the tissue of interest. For cell-type specific base editing, the expression of the base editor and optional guide nucleic acid can be driven by a cell-type specific promoter.

[0498] For in vivo delivery, AAV can be advantageous over other viral vectors. In some cases, AAV allows low toxicity, which can be due to the purification method not requiring ultra-centrifugation of cell particles that can activate the immune response. In some cases, AAV allows low probability of causing insertional mutagenesis because it doesn't integrate into the host genome.

[0499] AAV has a packaging limit of 4.5 or 4.75 Kb. This means disclosed base editor as well as a promoter and transcription terminator can fit into a single viral vector. Constructs larger than 4.5 or 4.75 Kb can lead to significantly reduced virus production. For example, SpCas9 is quite large, the gene itself is over 4.1 Kb, which makes it difficult for packing into AAV. Therefore, embodiments of the present disclosure include utilizing a disclosed base editor which is shorter in length than conventional base editors. In some examples, the base editors are less than 4 kb. Disclosed base editors can be less than 4.5 kb, 4.4 kb, 4.3 kb, 4.2 kb, 4.1 kb, 4 kb, 3.9 kb, 3.8 kb, 3.7 kb, 3.6 kb, 3.5 kb, 3.4 kb, 3.3 kb, 3.2 kb, 3.1 kb, 3 kb, 2.9 kb, 2.8 kb, 2.7 kb, 2.6 kb, 2.5 kb, 2 kb, or 1.5 kb. In some cases, the disclosed base editors are 4.5 kb or less in length.

[0500] An AAV can be AAV1, AAV2, AAV5 or any combination thereof. One can select the type of AAV with regard to the cells to be targeted; e.g., one can select AAV serotypes 1, 2, 5 or a hybrid capsid AAV1, AAV2, AAV5 or any combination thereof for targeting brain or neuronal cells; and one can select AAV4 for targeting cardiac tissue. AAV8 is useful for delivery to the liver. A tabulation of certain AAV serotypes as to these cells can be found in Grimm, D. et al, J. Virol. 82: 5887-5911 (2008)).

[0501] Lentiviruses are complex retroviruses that have the ability to infect and express their genes in both mitotic and post-mitotic cells. The most commonly known lentivirus is the human immunodeficiency virus (HIV), which uses the envelope glycoproteins of other viruses to target a broad range of cell types.

[0502] Lentiviruses can be prepared as follows. After cloning pCasES10 (which contains a lentiviral transfer plasmid backbone), HEK293FT at low passage (p=5) were seeded in a T-75 flask to 50% confluence the day before transfection in DMEM with 10% fetal bovine serum and without antibiotics. After 20 hours, media is changed to OptiMEM (serum-free) media and transfection was done 4 hours later. Cells are transfected with 10 μg of lentiviral transfer plasmid (pCasES10) and the following packaging plasmids: 5 μg of pMD2.G (VSV-g pseudotype), and 7.5 μg of psPAX2 (gag/pol/rev/tat). Transfection can be done in 4 mL OptiMEM with a cationic lipid delivery agent (50 μl Lipofectamine 2000 and 100 ul Plus reagent). After 6 hours, the media is changed to antibiotic-free DMEM with 10% fetal bovine serum. These methods use serum during cell culture, but serum-free methods are preferred.

[0503] Lentivirus can be purified as follows. Viral supernatants are harvested after 48 hours. Supernatants are first cleared of debris and filtered through a 0.45 μm low protein binding (PVDF) filter. They are then spun in an ultracentrifuge for 2 hours at 24,000 rpm. Viral pellets are resuspended in 50 μl of DMEM overnight at 4° C. They are then aliquoted and immediately frozen at −80° C.

[0504] In another embodiment, minimal non-primate lentiviral vectors based on the equine infectious anemia virus (EIAV) are also contemplated. In another embodiment, RetinoStat®, an equine infectious anemia virus-based lentiviral gene therapy vector that expresses angiostatic proteins endostatin and angiostatin that is contemplated to be delivered via a subretinal injection. In another embodiment, use of self-inactivating lentiviral vectors is contemplated.

[0505] Any RNA of the systems, for example a guide RNA or a base editor-encoding mRNA, can be delivered in the form of RNA. Base editor-encoding mRNA can be generated using in vitro transcription. For example, nuclease mRNA can be synthesized using a PCR cassette containing the following elements: T7 promoter, optional kozak sequence (GCCACC), nuclease sequence, and 3′ UTR such as a 3′ UTR from beta globin-polyA tail. The cassette can be used for transcription by T7 polymerase. Guide polynucleotides (e.g., gRNA) can also be transcribed using in vitro transcription from a cassette containing a T7 promoter, followed by the sequence “GG”, and guide polynucleotide sequence.

[0506] To enhance expression and reduce possible toxicity, the base editor-coding sequence and/or the guide nucleic acid can be modified to include one or more modified nucleoside e.g. using pseudo-U or 5-Methyl-C.

[0507] The disclosure in some embodiments comprehends a method of modifying a cell or organism. The cell can be a prokaryotic cell or a eukaryotic cell. The cell can be a mammalian cell. The mammalian cell many be a non-human primate, bovine, porcine, rodent or mouse cell. The modification introduced to the cell by the base editors, compositions and methods of the present disclosure can be such that the cell and progeny of the cell are altered for improved production of biologic products such as an antibody, starch, alcohol or other desired cellular output. The modification introduced to the cell by the methods of the present disclosure can be such that the cell and progeny of the cell include an alteration that changes the biologic product produced.

[0508] The system can comprise one or more different vectors. In an aspect, the base editor is codon optimized for expression the desired cell type, preferentially a eukaryotic cell, preferably a mammalian cell or a human cell.

[0509] In general, codon optimization refers to a process of modifying a nucleic acid sequence for enhanced expression in the host cells of interest by replacing at least one codon (e.g. about or more than about 1, 2, 3, 4, 5, 10, 15, 20, 25, 50, or more codons) of the native sequence with codons that are more frequently or most frequently used in the genes of that host cell while maintaining the native amino acid sequence. Various species exhibit particular bias for certain codons of a particular amino acid. Codon bias (differences in codon usage between organisms) often correlates with the efficiency of translation of messenger RNA (mRNA), which is in turn believed to be dependent on, among other things, the properties of the codons being translated and the availability of particular transfer RNA (tRNA) molecules. The predominance of selected tRNAs in a cell is generally a reflection of the codons used most frequently in peptide synthesis. Accordingly, genes can be tailored for optimal gene expression in a given organism based on codon optimization. Codon usage tables are readily available, for example, at the “Codon Usage Database” available at www.kazusa.orjp/codon/(visited Jul. 9, 2002), and these tables can be adapted in a number of ways. See, Nakamura, Y., et al. “Codon usage tabulated from the international DNA sequence databases: status for the year 2000” Nucl. Acids Res. 28:292 (2000). Computer algorithms for codon optimizing a particular sequence for expression in a particular host cell are also available, such as Gene Forge (Aptagen; Jacobus, Pa.), are also available. In some embodiments, one or more codons (e.g. 1, 2, 3, 4, 5, 10, 15, 20, 25, 50, or more, or all codons) in a sequence encoding an engineered nuclease correspond to the most frequently used codon for a particular amino acid.

[0510] Packaging cells are typically used to form virus particles that are capable of infecting a host cell. Such cells include 293 cells, which package adenovirus, and psi.2 cells or PA317 cells, which package retrovirus. Viral vectors used in gene therapy are usually generated by producing a cell line that packages a nucleic acid vector into a viral particle. The vectors typically contain the minimal viral sequences required for packaging and subsequent integration into a host, other viral sequences being replaced by an expression cassette for the polynucleotide(s) to be expressed. The missing viral functions are typically supplied in trans by the packaging cell line. For example, AAV vectors used in gene therapy typically only possess ITR sequences from the AAV genome which are required for packaging and integration into the host genome. Viral DNA can be packaged in a cell line, which contains a helper plasmid encoding the other AAV genes, namely rep and cap, but lacking ITR sequences. The cell line can also be infected with adenovirus as a helper. The helper virus can promote replication of the AAV vector and expression of AAV genes from the helper plasmid. The helper plasmid in some cases is not packaged in significant amounts due to a lack of ITR sequences. Contamination with adenovirus can be reduced by, e.g., heat treatment to which adenovirus is more sensitive than AAV.

### Pharmaceutical Compositions

[0511] Other aspects of the present disclosure relate to pharmaceutical compositions comprising any of the base editors, fusion proteins, or the fusion protein-guide polynucleotide complexes described herein. The term “pharmaceutical composition”, as used herein, refers to a composition formulated for pharmaceutical use. In some embodiments, the pharmaceutical composition further comprises a pharmaceutically acceptable carrier. In some embodiments, the pharmaceutical composition comprises additional agents (e.g., for specific delivery, increasing half-life, or other therapeutic compounds).

[0512] As used here, the term “pharmaceutically-acceptable carrier” means a pharmaceutically-acceptable material, composition or vehicle, such as a liquid or solid filler, diluent, excipient, manufacturing aid (e.g., lubricant, talc magnesium, calcium or zinc stearate, or steric acid), or solvent encapsulating material, involved in carrying or transporting the compound from one site (e.g., the delivery site) of the body, to another site (e.g., organ, tissue or portion of the body). A pharmaceutically acceptable carrier is “acceptable” in the sense of being compatible with the other ingredients of the formulation and not injurious to the tissue of the subject (e.g., physiologically compatible, sterile, physiologic pH, etc.).

[0513] Some nonlimiting examples of materials which can serve as pharmaceutically-acceptable carriers include: (1) sugars, such as lactose, glucose and sucrose; (2) starches, such as corn starch and potato starch; (3) cellulose, and its derivatives, such as sodium carboxymethyl cellulose, methylcellulose, ethyl cellulose, microcrystalline cellulose and cellulose acetate; (4) powdered tragacanth; (5) malt; (6) gelatin; (7) lubricating agents, such as magnesium stearate, sodium lauryl sulfate and talc; (8) excipients, such as cocoa butter and suppository waxes; (9) oils, such as peanut oil, cottonseed oil, safflower oil, sesame oil, olive oil, corn oil and soybean oil; (10) glycols, such as propylene glycol; (11) polyols, such as glycerin, sorbitol, mannitol and polyethylene glycol (PEG); (12) esters, such as ethyl oleate and ethyl laurate; (13) agar; (14) buffering agents, such as magnesium hydroxide and aluminum hydroxide; (15) alginic acid; (16) pyrogen-free water; (17) isotonic saline; (18) Ringer's solution; (19) ethyl alcohol; (20) pH buffered solutions; (21) polyesters, polycarbonates and/or polyanhydrides; (22) bulking agents, such as polypeptides and amino acids (23) serum alcohols, such as ethanol; and (23) other non-toxic compatible substances employed in pharmaceutical formulations. Wetting agents, coloring agents, release agents, coating agents, sweetening agents, flavoring agents, perfuming agents, preservative and antioxidants can also be present in the formulation. The terms such as “excipient,” “carrier,” “pharmaceutically acceptable carrier,” “vehicle,” or the like are used interchangeably herein.

[0514] Pharmaceutical compositions can comprise one or more pH buffering compounds to maintain the pH of the formulation at a predetermined level that reflects physiological pH, such as in the range of about 5.0 to about 8.0. The pH buffering compound used in the aqueous liquid formulation can be an amino acid or mixture of amino acids, such as histidine or a mixture of amino acids such as histidine and glycine. Alternatively, the pH buffering compound is preferably an agent which maintains the pH of the formulation at a predetermined level, such as in the range of about 5.0 to about 8.0, and which does not chelate calcium ions. Illustrative examples of such pH buffering compounds include, but are not limited to, imidazole and acetate ions. The pH buffering compound may be present in any amount suitable to maintain the pH of the formulation at a predetermined level.

[0515] Pharmaceutical compositions can also contain one or more osmotic modulating agents, i.e., a compound that modulates the osmotic properties (e.g, tonicity, osmolality, and/or osmotic pressure) of the formulation to a level that is acceptable to the blood stream and blood cells of recipient individuals. The osmotic modulating agent can be an agent that does not chelate calcium ions. The osmotic modulating agent can be any compound known or available to those skilled in the art that modulates the osmotic properties of the formulation. One skilled in the art may empirically determine the suitability of a given osmotic modulating agent for use in the inventive formulation. Illustrative examples of suitable types of osmotic modulating agents include, but are not limited to: salts, such as sodium chloride and sodium acetate; sugars, such as sucrose, dextrose, and mannitol; amino acids, such as glycine; and mixtures of one or more of these agents and/or types of agents. The osmotic modulating agent(s) may be present in any concentration sufficient to modulate the osmotic properties of the formulation.

[0516] In some embodiments, the pharmaceutical composition is formulated for delivery to a subject, e.g., for gene editing. Suitable routes of administrating the pharmaceutical composition described herein include, without limitation: topical, subcutaneous, transdermal, intradermal, intralesional, intraarticular, intraperitoneal, intravesical, transmucosal, gingival, intradental, intracochlear, transtympanic, intraorgan, epidural, intrathecal, intramuscular, intravenous, intravascular, intraosseus, periocular, intratumoral, intracerebral, and intracerebroventricular administration.

[0517] In some embodiments, the pharmaceutical composition described herein is administered locally to a diseased site (e.g., tumor site). In some embodiments, the pharmaceutical composition described herein is administered to a subject by injection, by means of a catheter, by means of a suppository, or by means of an implant, the implant being of a porous, non-porous, or gelatinous material, including a membrane, such as a sialastic membrane, or a fiber.

[0518] In other embodiments, the pharmaceutical composition described herein is delivered in a controlled release system. In one embodiment, a pump can be used (See, e.g., Langer, 1990, Science 249: 1527-1533; Sefton, 1989, CRC Crit. Ref. Biomed. Eng. 14:201; Buchwald et al., 1980, Surgery 88:507; Saudek et al., 1989, N. Engl. J. Med. 321:574). In another embodiment, polymeric materials can be used. (See, e.g., Medical Applications of Controlled Release (Langer and Wise eds., CRC Press, Boca Raton, Fla., 1974); Controlled Drug Bioavailability, Drug Product Design and Performance (Smolen and Ball eds., Wiley, New York, 1984); Ranger and Peppas, 1983, Macromol. Sci. Rev. Macromol. Chem. 23:61. See also Levy et al., 1985, Science 228: 190; During et al., 1989, Ann. Neurol. 25:351; Howard et ah, 1989, J. Neurosurg. 71: 105.) Other controlled release systems are discussed, for example, in Langer, supra.

[0519] In some embodiments, the pharmaceutical composition is formulated in accordance with routine procedures as a composition adapted for intravenous or subcutaneous administration to a subject, e.g., a human. In some embodiments, pharmaceutical composition for administration by injection are solutions in sterile isotonic use as solubilizing agent and a local anesthetic such as lignocaine to ease pain at the site of the injection. Generally, the ingredients are supplied either separately or mixed together in unit dosage form, for example, as a dry lyophilized powder or water free concentrate in a hermetically sealed container such as an ampoule or sachette indicating the quantity of active agent. Where the pharmaceutical is to be administered by infusion, it can be dispensed with an infusion bottle containing sterile pharmaceutical grade water or saline. Where the pharmaceutical composition is administered by injection, an ampoule of sterile water for injection or saline can be provided so that the ingredients can be mixed prior to administration.

[0520] A pharmaceutical composition for systemic administration can be a liquid, e.g., sterile saline, lactated Ringer's or Hank's solution. In addition, the pharmaceutical composition can be in solid forms and re-dissolved or suspended immediately prior to use. Lyophilized forms are also contemplated. The pharmaceutical composition can be contained within a lipid particle or vesicle, such as a liposome or microcrystal, which is also suitable for parenteral administration. The particles can be of any suitable structure, such as unilamellar or plurilamellar, so long as compositions are contained therein. Compounds can be entrapped in “stabilized plasmid-lipid particles” (SPLP) containing the fusogenic lipid dioleoylphosphatidylethanolamine (DOPE), low levels (5-10 mol %) of cationic lipid, and stabilized by a polyethyleneglycol (PEG) coating (Zhang Y. P. et ah, Gene Ther. 1999, 6: 1438-47). Positively charged lipids such as N-[1-(2,3-dioleoyloxi)propyl]-N,N,N-trimethyl-amoniummethylsulfate, or “DOTAP,” are particularly preferred for such particles and vesicles. The preparation of such lipid particles is well known. See, e.g., U.S. Pat. Nos. 4,880,635; 4,906,477; 4,911,928; 4,917,951; 4,920,016; and 4,921,757; each of which is incorporated herein by reference.

[0521] The pharmaceutical composition described herein can be administered or packaged as a unit dose, for example. The term “unit dose” when used in reference to a pharmaceutical composition of the present disclosure refers to physically discrete units suitable as unitary dosage for the subject, each unit containing a predetermined quantity of active material calculated to produce the desired therapeutic effect in association with the required diluent; i.e., carrier, or vehicle.

[0522] Further, the pharmaceutical composition can be provided as a pharmaceutical kit comprising (a) a container containing a compound of the invention in lyophilized form and (b) a second container containing a pharmaceutically acceptable diluent (e.g., sterile used for reconstitution or dilution of the lyophilized compound of the invention. Optionally associated with such container(s) can be a notice in the form prescribed by a governmental agency regulating the manufacture, use or sale of pharmaceuticals or biological products, which notice reflects approval by the agency of manufacture, use or sale for human administration.

[0523] In another aspect, an article of manufacture containing materials useful for the treatment of the diseases described above is included. In some embodiments, the article of manufacture comprises a container and a label. Suitable containers include, for example, bottles, vials, syringes, and test tubes. The containers can be formed from a variety of materials such as glass or plastic. In some embodiments, the container holds a composition that is effective for treating a disease described herein and can have a sterile access port. For example, the container can be an intravenous solution bag or a vial having a stopper pierceable by a hypodermic injection needle. The active agent in the composition is a compound of the invention. In some embodiments, the label on or associated with the container indicates that the composition is used for treating the disease of choice. The article of manufacture can further comprise a second container comprising a pharmaceutically-acceptable buffer, such as phosphate-buffered saline, Ringer's solution, or dextrose solution. It can further include other materials desirable from a commercial and user standpoint, including other buffers, diluents, filters, needles, syringes, and package inserts with instructions for use.

[0524] In some embodiments, any of the fusion proteins, gRNAs, and/or complexes described herein are provided as part of a pharmaceutical composition. In some embodiments, the pharmaceutical composition comprises any of the fusion proteins provided herein. In some embodiments, the pharmaceutical composition comprises any of the complexes provided herein. In some embodiments, the pharmaceutical composition comprises a ribonucleoprotein complex comprising an RNA-guided nuclease (e.g., Cas9) that forms a complex with a gRNA and a cationic lipid. In some embodiments pharmaceutical composition comprises a gRNA, a nucleic acid programmable DNA binding protein, a cationic lipid, and a pharmaceutically acceptable excipient. Pharmaceutical compositions can optionally comprise one or more additional therapeutically active substances.

### Methods of Treating A1AD

[0525] Provided also are methods of treating A1AD and/or the genetic mutations in SERPINA1 that cause A1AD that comprise administering to a subject (e.g., a mammal, such as a human) a therapeutically effective amount of a pharmaceutical composition that comprises a polynucleotide encoding a base editor system (e.g., base editor and gRNA) described herein. In some embodiments, the base editor is a fusion protein that comprises a polynucleotide programmable DNA binding domain and an adenosine deaminase domain or a cytidine deaminase domain. A cell of the subject is transduced with the base editor and one or more guide polynucleotides that target the base editor to effect an A⋅T to G⋅C alteration (if the cell is transduced with an adenosine deaminase domain) or a CG to UA alteration (if the cell is transduced with a cytidine deaminase domain) of a nucleic acid sequence containing mutations in the SERPINA1 gene.

[0526] The methods herein include administering to the subject (including a subject identified as being in need of such treatment, or a subject suspected of being at risk of disease and in need of such treatment) an effective amount of a composition described herein. Identifying a subject in need of such treatment can be in the judgment of a subject or a health care professional and can be subjective (e.g. opinion) or objective (e.g. measurable by a test or diagnostic method).

[0527] The therapeutic methods, in general, comprise administration of a therapeutically effective amount of a pharmaceutical composition comprising, for example, a vector encoding a base editor and a gRNA that targets the SERPINA1 gene of a subject (e.g., a human patient) in need thereof. Such treatment will be suitably administered to a subject, particularly a human subject, suffering from, having, susceptible to, or at risk for A1AD. The compositions herein may be also used in the treatment of any other disorders in which A1AD may be implicated.

[0528] In one embodiment, a method of monitoring treatment progress is provided. The method includes the step of determining a level of diagnostic marker (Marker) (e.g., SNP associated with MAD) or diagnostic measurement (e.g., screen, assay) in a subject suffering from or susceptible to a disorder or symptoms thereof associated with A1AD in which the subject has been administered a therapeutic amount of a composition herein sufficient to treat the disease or symptoms thereof. The level of Marker determined in the method can be compared to known levels of Marker in either healthy normal controls or in other afflicted patients to establish the subject's disease status. In preferred embodiments, a second level of Marker in the subject is determined at a time point later than the determination of the first level, and the two levels are compared to monitor the course of disease or the efficacy of the therapy. In certain preferred embodiments, a pre-treatment level of Marker in the subject is determined prior to beginning treatment according to this invention; this pre-treatment level of Marker can then be compared to the level of Marker in the subject after the treatment commences, to determine the efficacy of the treatment.

[0529] In some embodiments, compositions provided herein are administered to a subject, for example, to a human subject, in order to effect a targeted genomic modification within the subject. In some embodiments, cells are obtained from the subject and contacted with any of the pharmaceutical compositions provided herein. In some embodiments, cells removed from a subject and contacted ex vivo with a pharmaceutical composition are re-introduced into the subject, optionally after the desired genomic modification has been effected or detected in the cells. Methods of delivering pharmaceutical compositions comprising nucleases are known, and are described, for example, in U.S. Pat. Nos. 6,453,242; 6,503,717; 6,534,261; 6,599,692; 6,607,882; 6,689,558; 6,824,978; 6,933,113; 6,979,539; 7,013,219; and 7,163,824, the disclosures of all of which are incorporated by reference herein in their entireties. Although the descriptions of pharmaceutical compositions provided herein are principally directed to pharmaceutical compositions which are suitable for administration to humans, it will be understood by the skilled artisan that such compositions are generally suitable for administration to animals or organisms of all sorts, for example, for veterinary use.

[0530] Modification of pharmaceutical compositions suitable for administration to humans in order to render the compositions suitable for administration to various animals is well understood, and the ordinarily skilled veterinary pharmacologist can design and/or perform such modification with merely ordinary, if any, experimentation. Subjects to which administration of the pharmaceutical compositions is contemplated include, but are not limited to, humans and/or other primates; mammals, domesticated animals, pets, and commercially relevant mammals such as cattle, pigs, horses, sheep, cats, dogs, mice, and/or rats; and/or birds, including commercially relevant birds such as chickens, ducks, geese, and/or turkeys.

[0531] Formulations of the pharmaceutical compositions described herein can be prepared by any method known or hereafter developed in the art of pharmacology. In general, such preparatory methods include the step of bringing the active ingredient(s) into association with an excipient and/or one or more other accessory ingredients, and then, if necessary and/or desirable, shaping and/or packaging the product into a desired single- or multi-dose unit. Pharmaceutical formulations can additionally comprise a pharmaceutically acceptable excipient, which, as used herein, includes any and all solvents, dispersion media, diluents, or other liquid vehicles, dispersion or suspension aids, surface active agents, isotonic agents, thickening or emulsifying agents, preservatives, solid binders, lubricants and the like, as suited to the particular dosage form desired. Remington's The Science and Practice of Pharmacy, 21st Edition, A. R. Gennaro (Lippincott, Williams & Wilkins, Baltimore, Md., 2006; incorporated in its entirety herein by reference) discloses various excipients used in formulating pharmaceutical compositions and known techniques for the preparation thereof. See also PCT application PCT/US2010/055131 (Publication number WO2011/053982 A8, filed Nov. 2, 2010), incorporated in its entirety herein by reference, for additional suitable methods, reagents, excipients and solvents for producing pharmaceutical compositions comprising a nuclease.

[0532] Except insofar as any conventional excipient medium is incompatible with a substance or its derivatives, such as by producing any undesirable biological effect or otherwise interacting in a deleterious manner with any other component(s) of the pharmaceutical composition, its use is contemplated to be within the scope of this disclosure.

[0533] The compositions, as described above, can be administered in effective amounts. The effective amount will depend upon the mode of administration, the particular condition being treated, and the desired outcome. It may also depend upon the stage of the condition, the age and physical condition of the subject, the nature of concurrent therapy, if any, and like factors well-known to the medical practitioner. For therapeutic applications, it is that amount sufficient to achieve a medically desirable result.

[0534] In some embodiments, compositions in accordance with the present disclosure can be used for treatment of any of a variety of diseases, disorders, and/or conditions, including but not limited to one or more of the following: autoimmune disorders (e.g., diabetes, lupus, multiple sclerosis, psoriasis, rheumatoid arthritis); inflammatory disorders (e.g., arthritis, pelvic inflammatory disease); infectious diseases (e.g., viral infections (e.g., HIV, HCV, RSV), bacterial infections, fungal infections, sepsis); neurological disorders (e.g., Alzheimer's disease, Huntington's disease; autism; Duchenne muscular dystrophy); cardiovascular disorders (e.g., atherosclerosis, hypercholesterolemia, thrombosis, clotting disorders, angiogenic disorders such as macular degeneration); proliferative disorders (e.g., cancer, benign neoplasms); respiratory disorders (e.g., chronic obstructive pulmonary disease); digestive disorders (e.g., inflammatory bowel disease, ulcers); musculoskeletal disorders (e.g., fibromyalgia, arthritis); endocrine, metabolic, and nutritional disorders (e.g., diabetes, osteoporosis); urological disorders (e.g., renal disease); psychological disorders (e.g., depression, schizophrenia); skin disorders (e.g., wounds, eczema); blood and lymphatic disorders (e.g., anemia, hemophilia); etc.

### Kits

[0535] Various aspects of this disclosure provide kits comprising a base editor system. In one embodiment, the kit comprises a nucleic acid construct comprising a nucleotide sequence encoding a nucleobase editor fusion protein. The fusion protein comprises a deaminase (e.g., cytidine deaminase or adenine deaminase) and a nucleic acid programmable DNA binding protein (napDNAbp). In some embodiments, the kit comprises at least one guide RNA capable of targeting a nucleic acid molecule of interest, e.g., A1AD-associated mutations. In some embodiments, the kit comprises a nucleic acid construct comprising a nucleotide sequence encoding at least one guide RNA.

[0536] The kit provides, in some embodiments, instructions for using the kit to edit one or more A1AD-associated mutations. The instructions will generally include information about the use of the kit for editing nucleic acid molecules. In other embodiments, the instructions include at least one of the following: precautions; warnings; clinical studies; and/or references. The instructions may be printed directly on the container (when present), or as a label applied to the container, or as a separate sheet, pamphlet, card, or folder supplied in or with the container. In a further embodiment, a kit can comprise instructions in the form of a label or separate insert (package insert) for suitable operational parameters. In yet another embodiment, the kit can comprise one or more containers with appropriate positive and negative controls or control samples, to be used as standard(s) for detection, calibration, or normalization. The kit can further comprise a second container comprising a pharmaceutically-acceptable buffer, such as (sterile) phosphate-buffered saline, Ringer's solution, or dextrose solution. It can further include other materials desirable from a commercial and user standpoint, including other buffers, diluents, filters, needles, syringes, and package inserts with instructions for use.

[0537] In certain embodiments, the kit is useful for the treatment of a subject having Alpha-1 antitrypsin deficiency (A1AD).

[0538] The following numbered additional embodiments encompassing the methods and compositions of the base editor systems and uses are envisioned herein:
[0539] 1. A method of treating Alpha-1 antitrypsin deficiency (A1AD) in a subject in need thereof, comprising administering to the subject a base editor system comprising
[0540] a guide polynucleotide or a nucleic acids encoding the guide polynucleotide;
[0541] a polynucleotide programmable DNA binding domain or a nucleic acid encoding the polynucleotide programmable DNA binding domain, and
[0542] an adenosine deaminase domain or a nucleic acid encoding the adenosine deaminase domain,
[0543] wherein the guide polynucleotide is capable of targeting the base editor system to effect an A⋅T to G⋅C alteration of a single nucleotide polymorphism (SNP) in a SERPINA1 polynucleotide of a cell in the subject, thereby treating A1AD;
[0544] wherein the SNP is causative of A1AD.
[0545] 2. A method of treating Alpha-1 antitrypsin deficiency (A1AD) in a subject in need thereof, comprising
[0546] (a) introducing into a cell a base editor system comprising
[0547] a guide polynucleotides or a nucleic acid encoding the guide polynucleotide;
[0548] a polynucleotide programmable DNA binding domain or a nucleic acid encoding the polynucleotide programmable DNA binding domain, and
[0549] an adenosine deaminase domain or a nucleic acid encoding the adenosine deaminase domain, and
[0550] (b) administering the cell to the subject,
[0551] wherein the guide polynucleotide is capable of targeting the base editor system to effect an A⋅T to G⋅C alteration of a single nucleotide polymorphism (SNP) in a SERPINA1 polynucleotide in the cell, thereby treating A1AD;
[0552] wherein the SNP is causative of A1AD.
[0553] 3. The method of embodiment 2, wherein the cell is a hepatocyte or a progenitor thereof
[0554] 4. The method of any one of embodiment 2 or 3, wherein the cell is autologous, allogenic, or xenogenic to the subject.
[0555] 5. A method of correcting a single nucleotide polymorphism (SNP) causative of Alpha-1 antitrypsin deficiency (A1AD) in a SERPINA1 polynucleotide, comprising contacting the SERPINA1 polynucleotide with a base editor system comprising
[0556] a guide polynucleotides;
[0557] a polynucleotide programmable DNA binding domain, and
[0558] an adenosine deaminase domain,
[0559] wherein the guide polynucleotides is capable of targeting the base editor system to effect an A⋅T to G⋅C of the SNP in the SERPINA1 polynucleotide, thereby correcting the SNP.
[0560] 6. A method of producing a modified cell for treatment of Alpha-1 antitrypsin deficiency (A1AD), comprising introducing into a cell a base editor system comprising
[0561] a guide polynucleotides or a nucleic acid encoding the guide polynucleotide;
[0562] a polynucleotide programmable DNA binding domain or a nucleic acid encoding the polynucleotide programmable DNA binding domain, and
[0563] an adenosine deaminase domain or a nucleic acid encoding the adenosine deaminase domain,
[0564] wherein the guide polynucleotide is capable of targeting the base editor system to effect an A⋅T to G⋅C alteration of a single nucleotide polymorphism (SNP) causative of A1AD in a SERPINA1 polynucleotide in the cell.
[0565] 7. The method of embodiment 6, wherein the introduction is in vivo.
[0566] 8. The method of embodiment 6, wherein the introduction is ex vivo.
[0567] 9. The method of any one of embodiments 6-8, wherein the cell is a hepatocyte of a progenitor thereof
[0568] 10. The method of any one of embodiments 6-9, wherein the cell is obtained from a subject having A1AD.
[0569] 11. The method of any one of the preceding embodiments, wherein SERPINA1 polynucleotide encodes an A1AT protein comprising a lysine at position 342 resulted from the SNP.
[0570] 12. The method of embodiment 11, wherein the A⋅T to G⋅C alteration substitutes the lysine with a wild type amino acid.
[0571] 13. A method of treating Alpha-1 antitrypsin deficiency (A1AD) in a subject in need thereof, comprising administering to the subject a base editor system comprising
[0572] a guide polynucleotide or a nucleic acid encoding the guide polynucleotide;
[0573] a polynucleotide programmable DNA binding domain or a nucleic acid encoding the polynucleotide programmable DNA binding domain, and
[0574] an adenosine deaminase domain or a nucleic acid encoding the adenosine deaminase domain,
[0575] wherein the guide polynucleotide is capable of targeting the base editor system to effect an A⋅T to G⋅C alteration of a single nucleotide polymorphism (SNP) causative of A1AD in a SERPINA1 polynucleotide of a cell in the subject,
[0576] wherein the SERPINA1 polynucleotide encodes a A1AT protein comprising an lysine acid at position 342 resulted from the SNP,
[0577] wherein the A⋅T to G⋅C alteration substitutes the lysine with a wild type amino acid, thereby treating A1AD.
[0578] 14. A method of treating Alpha-1 antitrypsin deficiency (A1AD) in a subject in need thereof, comprising
[0579] (a) contacting a cell with a base editor system comprising
[0580] a guide polynucleotide or a nucleic acid encoding the guide polynucleotide;
[0581] a polynucleotide programmable DNA binding domain or a nucleic acid encoding the polynucleotide programmable DNA binding domain, and
[0582] an adenosine deaminase domain or a nucleic acid encoding the adenosine deaminase domain,
[0583] (b) administering the cell to the subject,
[0584] wherein the guide polynucleotide is capable of targeting the base editor system to effect an A⋅T to G⋅C alteration of a single nucleotide polymorphism (SNP) causative of A1AD in a SERPINA1 polynucleotide in the cell,
[0585] wherein the SERPINA1 polynucleotide encodes a A1AT protein comprising a lysine at position 342 resulted from the SNP,
[0586] wherein the A⋅T to G⋅C alteration substitutes the lysine with a wild type amino acid, thereby treating A1AD.
[0587] 15. The method of embodiment 14, wherein the cell is a hepatocyte or a progenitor thereof
[0588] 16. The method of embodiment 14 or 15, wherein the cell is autologous, allogenic, or xenogenic to the subject.
[0589] 17. A method of correcting a single nucleotide polymorphism (SNP) causative of Alpha-1 antitrypsin deficiency (A1AD) in a SERPINA1 polynucleotide, comprising contacting the SERPINA1 polynucleotide with a base editor system comprising
[0590] a guide polynucleotide;
[0591] a polynucleotide programmable DNA binding domain, and
[0592] an adenosine deaminase domain,
[0593] wherein the guide polynucleotides is capable of targeting the base editor system to effect an A⋅T to G⋅C of the SNP,
[0594] wherein the SERPINA1 polynucleotide encodes a A1AT protein comprising a lysine at position 342 resulted from the SNP,
[0595] wherein the A⋅T to G⋅C alteration substitutes the lysine with a wild type amino acid, thereby correcting the SNP.
[0596] 18. A method of producing a modified cell for treatment of A1AD, comprising introducing into a cell a base editor system comprising
[0597] a guide polynucleotides or a nucleic acid encoding the guide polynucleotide;
[0598] a polynucleotide programmable DNA binding domain or a nucleic acid encoding the polynucleotide programmable DNA binding domain, and
[0599] an adenosine deaminase domain or a nucleic acid encoding the adenosine deaminase domain,
[0600] wherein the guide polynucleotide is capable of targeting the base editor system to effect an A⋅T to G⋅C alteration of a single nucleotide polymorphism (SNP) causative of A1AD in a SERPINA1 polynucleotide in the cell,
[0601] wherein the SERPINA1 polynucleotide encodes a A1AT protein comprising a lysine at position 342 resulted from the SNP,
[0602] wherein the A⋅T to G⋅C alteration substitutes the lysine with a wild type amino acid.
[0603] 19. The method of embodiment 18, wherein the introduction is in vivo.
[0604] 20. The method of embodiment 18, wherein the introduction is ex vivo.
[0605] 21. The method of any one of embodiments 18-20, wherein the cell is a hepatocyte or a progenitor thereof
[0606] 22. The method of any one of embodiments 18-21, wherein the cell is obtained from a subject having A1AD.
[0607] 23. The method of any one of embodiments 12-22, wherein the wild type amino acid is a glutamic acid.
[0608] 24. The method of any one of the preceding embodiments, wherein the polynucleotide programmable DNA binding domain is a Cas9 domain.
[0609] 25. The method of embodiment 24, wherein the Cas9 domain is a nuclease inactive Cas9 domain.
[0610] 26. The method of embodiment 24, wherein the Cas9 domain is a Cas9 nickase domain.
[0611] 27. The method of any one of embodiments 24-26, wherein the Cas9 domain comprises a SpCas9 domain.
[0612] 28. The method of embodiment 27, wherein the SpCas9 domain comprises a D10A and/or a H840A amino acid substitution or corresponding amino acid substitutions thereof
[0613] 29. The method of embodiment 27 or 28, wherein the SpCas9 domain has specificity for a NGG PAM.
[0614] 30. The method of any one of embodiments 27-29, wherein the SpCas9 domain has specificity for a NGA PAM, a NGT PAM, or a NGC PAM.
[0615] 31. The method of any one of embodiments 27-30, wherein the SpCas9 domain comprises amino acid substitutions L1111R, D1135V, G1218R, E1219F, A1322R, R1335V, T1337R and one or more of L1111, D1135L, S1136R, G1218S, E1219V, D1332A, R1335Q, T13371, T1337V, T1337F, and T1337M or corresponding amino acid substitutions thereof
[0616] 32. The method of any one of embodiments 27-31, wherein the SpCas9 domain comprises amino acid substitutions L1111R, D1135V, G1218R, E1219F, A1322R, R1335V, T1337R and one or more of L1111, D1135L, S1136R, G1218S, E1219V, D1332A, D1332S, D1332T, D1332V, D1332L, D1332K, D1332R, R1335Q, T13371, T1337V, T1337F, T1337S, T1337N, T1337K, T1337R, T1337H, T1337Q, and T1337M or corresponding amino acid substitutions thereof
[0617] 33. The method of any one of embodiments 27-32, wherein the SpCas9 domain comprises amino acid substitutions D1135L, S1136R, G1218S, E1219V, A1322R, R1335Q, T1337, and A1322R, and one or more of L1111, D1135L, S1136R, G1218S, E1219V, D1332A, D1332S, D1332T, D1332V, D1332L, D1332K, D1332R, R1335Q, T13371, T1337V, T1337F, T1337S, T1337N, T1337K, T1337R, T1337H, T1337Q, and T1337M or or corresponding amino acid substitutions thereof
[0618] 34. The method of any one of embodiments 27-33, wherein the SpCas9 domain comprises amino acid substitutions D1135M, S1136Q, G1218K, E1219F, A1322R, D1332A, R1335E, and T1337R, or corresponding amino acid substitutions thereof
[0619] 35. The method of any one of embodiments 27-34, wherein the SpCas9 domain has specificity for a NG PAM, a NNG PAM, a GAA PAM, a GAT PAM, or a CAA PAM.
[0620] 36. The method of embodiment 35, wherein the SpCas9 domain comprises amino acid substitutions E480K, E543K, and E1219V or corresponding amino acid substitutions thereof
[0621] 37. The method of any one of embodiments 27-29, wherein the Cas9 domain comprises a SaCas9 domain.
[0622] 38. The method of embodiment 27, wherein the SaCas9 domain has specificity for a NNNRRT PAM.
[0623] 39. The method of embodiment 38, wherein the SaCas9 domain has specificity for a NNGRRT PAM.
[0624] 40. The method of any one of embodiments 37-39, wherein the SaCas9 domain comprises an amino acid substitution N579A or a corresponding amino acid substitution thereof
[0625] 41. The method of any one of embodiments 37-40, wherein the SaCas9 domain comprises amino acid substitutions E782K, N968K, and R1015H, or corresponding amino acid substitutions thereof
[0626] 42. The method of any one of embodiments 27-29, wherein the Cas9 domain comprises a St1Cas9 domain:
[0627] 43. The method of embodiment 40, wherein the St1Cas9 domain has specificity for a NNACCA PAM.
[0628] 44. The method of any one of the preceding embodiments, wherein the adenosine deaminase domain is a modified adenosine deaminase domain that does not occur in nature.
[0629] 45. The method of embodiment 44, wherein the adenosine deaminase domain comprises a TadA domain.
[0630] 46. The method of embodiment 45, wherein the TadA domain comprises the amino acid sequence of TadA 7.10.
[0631] 47. The method of any one of the preceding embodiments, wherein the base editor system further comprises a zinc finger domain.
[0632] 48. The method of embodiment 47, wherein the zinc finger domain comprises recognition helix sequences RNEHLEV (SEQ ID NO: 268), QSTTLKR (SEQ ID NO: 269), and RTEHLAR (SEQ ID NO: 270) or recognition helix sequences RGEHLRQ (SEQ ID NO: 271), QSGTLKR (SEQ ID NO: 272), and RNDKLVP (SEQ ID NO: 273).
[0633] 49. The method of embodiment 47 or 48, wherein the zinc finger domain is zf1ra or zf1rb.
[0634] 50. The method of any one of the preceding embodiments, wherein the base editor system further comprises a nuclear localization signal (NLS).
[0635] 51. The method of any one of the preceding embodiments, wherein the base editor system further comprises one or more linkers.
[0636] 52. The method of embodiment 51, wherein two or more of the polynucleotide programmable DNA binding domain, the adenosine deaminase domain, the zinc finger domain, and the NLS are connected via a linker.
[0637] 53. The method of embodiment 52, wherein the linker is a peptide linker, thereby forming a base editing fusion protein.
[0638] 54. The method of embodiment 53, wherein the peptide linker comprises an amino acid sequence selected from the group consisting of SGGSSGSETPGTSESATPESSGGS (SEQ ID NO: 32), SGGSSGGSSGSETPGTSESATPESSGGSSGGS (SEQ ID NO: 33), GGSGGSPGSPAGSPTSTEEGTSESATPESGPGTSTEPSEGSAPGSPAGSPTSTEEGTSTEPS EGSAPGTSTEPSEGSAPGTSESATPESGPGSEPATSGGSGGS (SEQ ID NO: 34), SGGSSGGSSGSETPGTSESATPES (SEQ ID NO: 35), SGGSSGGSSGSETPGTSESATPESSGGSSGGSSGGSSGGS (SEQ ID NO: 36), SGGSSGGSSGSETPGTSESATPESSGGSSGGSSGGSSGGSSGSETPGTSESATPESSGGSSG GS (SEQ ID NO: 37), PGSPAGSPTSTEEGTSESATPESGPGTSTEPSEGSAPGSPAGSPTSTEEGTSTEPSEGSAP GTSTEPSEGSAPGTSESATPESGPGSEPATS (SEQ ID NO: 38), (SGGS)n (SEQ ID NO: 297), (GGGS)n (SEQ ID NO: 298), (GGGGS)n (SEQ ID NO: 299), (G)n, (EAAAK)n (SEQ ID NO: 300), (GGS)n, SGSETPGTSESATPES (SEQ ID NO: 16), and (XP)n.
[0639] 55. The method of embodiment 53 or 54, wherein the base editing fusion protein comprises the amino acid sequence selected from the group consisting of

(SEQ ID NO: 274)
MPKKKRKVSEVEFSHEYWMRHALTLAKRAWDEREVPVGAVLVHNNRVIGEGWNRPI
GRHDPTAHAEIMALRQGGLVMQNYRLIDATLYVTLEPCVMCAGAMIHSRIGRVVFGAR
DAKTGAAGSLMDVLHHPGMNHRVEITEGILADECAALLSDFFRMRRQEIKAQKKAQSS
TDSGGSSGGSSGSETPGTSESATPESSGGSSGGSSEVEFSHEYWMRHALTLAKRARDER
EVPVGAVLVLNNRVIGEGWNRAIGLHDPTAHAEIMALRQGGLVMQNYRLIDATLYVTF
EPCVMCAGAMIHSRIGRVVFGVRNAKTGAAGSLMDVLHYPGMNHRVEITEGILADECA
ALLCYFFRMPRQVFNAQKKAQSSTDSGGSSGGSSGSETPGTSESATPESDLVLGLAIGIG
SVGVGILNKVTGEIIHKNSRIFPAAQAENNLVRRTNRQGRRLARRKKHRRVRLNRLFEE
SGLITDFTKISINLNPYQLRVKGLTDELSNEELFIALKNMVKHRGISYLDDASDDGNSSV
GDYAQIVKENSKQLETKTPGQIQLERYQTYGQLRGDFTVEKDGKKHRLINVFPTSAYRS
EALRILQTQQEFNPQITDEFINRYLEILTGKRKYYHGPGNEKSRTDYGRYRTSGETLDNIF
GILIGKCTFYPDEFRAAKASYTAQEFNLLNDLNNLTVPTETKKLSKEQKNQIINYVKNEK
AMGPAKLFKYIAKLLSCDVADIKGYRIDKSGKAEIHTFEAYRKMKTLETLDIEQMDRET
LDKLAYVLTLNTEREGIQEALEHEFADGSFSQKQVDELVQFRKANSSIFGKGWHNFSVK
LMMELIPELYETSEEQMTILTRLGKQKTTSSSNKTKYIDEKLLTEEIYNPVVAKSVRQAI
KIVNAAIKEYGDFDNIVIEMARETNEDDEKKAIQKIQKANKDEKDAAMLKAANQYNGK
AELPHSVFHGHKQLATKIRLWHQQGERCLYTGKTISIHDLINNSNQFEVDHILPLSITFDD
SLANKVLVYATANQEKGQRTPYQALDSMDDAWSFRELKAFVRESKTLSNKKKEYLLT
EEDISKFDVRKKFIERNLVDTLYASRVVLNALQEHFRAHKIDTKVSVVRGQFTSQLRRH
WGIEKTRDTYHHHAVDALIIAASSQLNLWKKQKNTLVSYSEDQLLDIETGELISDDEYK
ESVFKAPYQHFVDTLKSKEFEDSILFSYQVDSKFNRKISDATIYATRQAKVGKDKADET
YVLGKIKDIYTQDGYDAFMKIYKKDKSKFLMYRHDPQTFEKVIEPILENYPNKQINDKG
KEVPCNPFLKYKEEHGYIRKYSKKGNGPEIKSLKYYDSKLGNHIDITPKDSNNKVVLQS
VSPWRADVYFNKTTGKYEILGLKYADLQFDKGTGTYKISQEKYNDIKKKEGVDSDSEF
KFTLYKNDLLLVKDTETKEQQLFRFLSRTMPKQKHYVELKPYDKQKFEGGEALIKVLG
NVANSGQCKKGLGKSNISIYKVRTDVLGNQHIIKNEGDKPKLDFPKKKRKVEGADKRT
ADGSEFESPKKKRKV,
(SEQ ID NO: 275)
MSEVEFSHEYWMRHALTLAKRAWDEREVPVGAVLVHNNRVIGEGWNRPIGRHDPTA
HAEIMALRQGGLVMQNYRLIDATLYVTLEPCVMCAGAMIHSRIGRVVFGARDAKTGA
AGSLMDVLHHPGMNHRVEITEGILADECAALLSDFFRMRRQEIKAQKKAQSSTDSGGSS
GGSSGSETPGTSESATPESSGGSSGGSSEVEFSHEYWMRHALTLAKRARDEREVPVGAV
LVLNNRVIGEGWNRAIGLHDPTAHAEIMALRQGGLVMQNYRLIDATLYVTFEPCVMCA
GAMIHSRIGRVVFGVRNAKTGAAGSLMDVLHYPGMNHRVEITEGILADECAALLCYFF
RMPRQVFNAQKKAQSSTDSGGSSGGSSGSETPGTSESATPESSGGSSGGSKRNYILGLAI
GITSVGYGIIDYETRDVIDAGVRLFKEANVENNEGRRSKRGARRLKRRRRHRIQRVKKL
LFDYNLLTDHSELSGINPYEARVKGLSQKLSEEEFSAALLHLAKRRGVHNVNEVEEDTG
NELSTKEQISRNSKALEEKYVAELQLERLKKDGEVRGSINRFKTSDYVKEAKQLLKVQK
AYHQLDQSFIDTYIDLLETRRTYYEGPGEGSPFGWKDIKEWYEMLMGHCTYFPEELRSV
KYAYNADLYNALNDLNNLVITRDENEKLEYYEKFQIIENVFKQKKKPTLKQIAKEILVN
EEDIKGYRVTSTGKPEFTNLKVYHDIKDITARKEIIENAELLDQIAKILTIYQSSEDIQEEL
TNLNSELTQEEIEQISNLKGYTGTHNLSLKAINLILDELWHTNDNQIAIFNRLKLVPKKV
DLSQQKEIPTTLVDDFILSPVVKRSFIQSIKVINAIIKKYGLPNDIIIELAREKNSKDAQKMI
NEMQKRNRQTNERIEEIIRTTGKENAKYLIEKIKLHDMQEGKCLYSLEAIPLEDLLNNPF
NYEVDHIIPRSVSFDNSFNNKVLVKQEENSKKGNRTPFQYLSSSDSKISYETFKKHILNLA
KGKGRISKTKKEYLLEERDINRFSVQKDFINRNLVDTRYATRGLMNLLRSYFRVNNLDV
KVKSINGGFTSFLRRKWKFKKERNKGYKHHAEDALIIANADFIFKEWKKLDKAKKVME
NQMFEEKQAESMPEIETEQEYKEIFITPHQIKHIKDFKDYKYSHRVDKKPNRKLINDTLY
STRKDDKGNTLIVNNLNGLYDKDNDKLKKLINKSPEKLLMYHHDPQTYQKLKLIMEQY
GDEKNPLYKYYEETGNYLTKYSKKDNGPVIKKIKYYGNKLNAHLDITDDYPNSRNKVV
KLSLKPYRFDVYLDNGVYKFVTVKNLDVIKKENYYEVNSKCYEEAKKLKKISNQAEFI
ASFYKNDLIKINGELYRVIGVNNDLLNRIEVNMIDITYREYLENMNDKRPPHIIKTIASKT
QSIKKYSTDILGNLYEVKSKKHPQIIKKGEGADKRTADGSEFESPKKKRKV,
(SEQ ID NO: 276)
MSEVEFSHEYWMRHALTLAKRAWDEREVPVGAVLVHNNRVIGEGWNRPIGRH
DPTAHAEIMALRQGGLVMQNYRLIDATLYVTLEPCVMCAGAMIHSRIGRVVFGARDA
KTGAAGSLMDVLHHPGMNHRVEITEGILADECAALLSDFFRMRRQEIKAQKKAQSSTD
SGGSSGGSSGSETPGTSESATPESSGGSSGGSSEVEFSHEYWMRHALTLAKRARDEREVP
VGAVLVLNNRVIGEGWNRAIGLHDPTAHAEIMALRQGGLVMQNYRLIDATLYVTFEPC
VMCAGAMIHSRIGRVVFGVRNAKTGAAGSLMDVLHYPGMNHRVEITEGILADECAAL
LCYFFRMPRQVFNAQKKAQSSTDSGGSSGGSSGSETPGTSESATPESSGGSSGGSKRNYI
LGLAIGITSVGYGIIDYETRDVIDAGVRLFKEANVENNEGRRSKRGARRLKRRRRHRIQR
VKKLLFDYNLLTDHSELSGINPYEARVKGLSQKLSEEEFSAALLHLAKRRGVHNVNEVE
EDTGNELSTKEQISRNSKALEEKYVAELQLERLKKDGEVRGSINRFKTSDYVKEAKQLL
KVQKAYHQLDQSFIDTYIDLLETRRTYYEGPGEGSPFGWKDIKEWYEMLMGHCTYFPE
ELRSVKYAYNADLYNALNDLNNLVITRDENEKLEYYEKFQIIENVFKQKKKPTLKQIAK
EILVNEEDIKGYRVTSTGKPEFTNLKVYHDIKDITARKEIIENAELLDQIAKILTIYQSSEDI
QEELTNLNSELTQEEIEQISNLKGYTGTHNLSLKAINLILDELWHTNDNQIAIFNRLKLVP
KKVDLSQQKEIPTTLVDDFILSPVVKRSFIQSIKVINAIIKKYGLPNDIIIELAREKNSKDAQ
KMINEMQKRNRQTNERIEEIIRTTGKENAKYLIEKIKLHDMQEGKCLYSLEAIPLEDLLN
NPFNYEVDHIIPRSVSFDNSFNNKVLVKQEENSKKGNRTPFQYLSSSDSKISYETFKKHIL
NLAKGKGRISKTKKEYLLEERDINRFSVQKDFINRNLVDTRYATRGLMNLLRSYFRVNN
LDVKVKSINGGFTSFLRRKWKFKKERNKGYKHHAEDALIIANADFIFKEWKKLDKAKK
VMENQMFEEKQAESMPEIETEQEYKEIFITPHQIKHIKDFKDYKYSHRVDKKPNRKLIND
TLYSTRKDDKGNTLIVNNLNGLYDKDNDKLKKLINKSPEKLLMYHHDPQTYQKLKLIM
EQYGDEKNPLYKYYEETGNYLTKYSKKDNGPVIKKIKYYGNKLNAHLDITDDYPNSRN
KVVKLSLKPYRFDVYLDNGVYKFVTVKNLDVIKKENYYEVNSKCYEEAKKLKKISNQ
AEFIASFYKNDLIKINGELYRVIGVNNDLLNRIEVNMIDITYREYLENMNDKRPPHIIKTI
ASKTQSIKKYSTDILGNLYEVKSKKHPQIIKKGEGADKRTADGSEFESPKKKRKVSSGNS
NANSRGPSFSSGLVPLSLRGSHSRPGERPFQCRICMRNFSRNEHLEVHTRTHTGEKPFQC
RICMRNFSQSTTLKRHLRTHTGEKPFQCRICMRNFSRTEHLARHLKTHLRGSSAQ,
or
(SEQ ID NO: 277)
MSEVEFSHEYWMRHALTLAKRAWDEREVPVGAVLVHNNRVIGEGWNRPIGRH
DPTAHAEIMALRQGGLVMQNYRLIDATLYVTLEPCVMCAGAMIHSRIGRVVFGARDA
KTGAAGSLMDVLHHPGMNHRVEITEGILADECAALLSDFFRMRRQEIKAQKKAQSSTD
SGGSSGGSSGSETPGTSESATPESSGGSSGGSSEVEFSHEYWMRHALTLAKRARDEREVP
VGAVLVLNNRVIGEGWNRAIGLHDPTAHAEIMALRQGGLVMQNYRLIDATLYVTFEPC
VMCAGAMIHSRIGRVVFGVRNAKTGAAGSLMDVLHYPGMNHRVEITEGILADECAAL
LCYFFRMPRQVFNAQKKAQSSTDSGGSSGGSSGSETPGTSESATPESSGGSSGGSKRNYI
LGLAIGITSVGYGIIDYETRDVIDAGVRLFKEANVENNEGRRSKRGARRLKRRRRHRIQR
VKKLLFDYNLLTDHSELSGINPYEARVKGLSQKLSEEEFSAALLHLAKRRGVHNVNEVE
EDTGNELSTKEQISRNSKALEEKYVAELQLERLKKDGEVRGSINRFKTSDYVKEAKQLL
KVQKAYHQLDQSFIDTYIDLLETRRTYYEGPGEGSPFGWKDIKEWYEMLMGHCTYFPE
ELRSVKYAYNADLYNALNDLNNLVITRDENEKLEYYEKFQIIENVFKQKKKPTLKQIAK
EILVNEEDIKGYRVTSTGKPEFTNLKVYHDIKDITARKEIIENAELLDQIAKILTIYQSSEDI
QEELTNLNSELTQEEIEQISNLKGYTGTHNLSLKAINLILDELWHTNDNQIAIFNRLKLVP
KKVDLSQQKEIPTTLVDDFILSPVVKRSFIQSIKVINAIIKKYGLPNDIIIELAREKNSKDAQ
KMINEMQKRNRQTNERIEEIIRTTGKENAKYLIEKIKLHDMQEGKCLYSLEAIPLEDLLN
NPFNYEVDHIIPRSVSFDNSFNNKVLVKQEENSKKGNRTPFQYLSSSDSKISYETFKKHIL
NLAKGKGRISKTKKEYLLEERDINRFSVQKDFINRNLVDTRYATRGLMNLLRSYFRVNN
LDVKVKSINGGFTSFLRRKWKFKKERNKGYKHHAEDALIIANADFIFKEWKKLDKAKK
VMENQMFEEKQAESMPEIETEQEYKEIFITPHQIKHIKDFKDYKYSHRVDKKPNRKLIND
TLYSTRKDDKGNTLIVNNLNGLYDKDNDKLKKLINKSPEKLLMYHHDPQTYQKLKLIM
EQYGDEKNPLYKYYEETGNYLTKYSKKDNGPVIKKIKYYGNKLNAHLDITDDYPNSRN
KVVKLSLKPYRFDVYLDNGVYKFVTVKNLDVIKKENYYEVNSKCYEEAKKLKKISNQ
AEFIASFYKNDLIKINGELYRVIGVNNDLLNRIEVNMIDITYREYLENMNDKRPPHIIKTI
ASKTQSIKKYSTDILGNLYEVKSKKHPQIIKKGEGADKRTADGSEFESPKKKRKVSSGNS
NANSRGPSFSSGLVPLSLRGSHSRPGERPFQCRICMRNFSRGEHLRQHTRTHTGEKPFQC
RICMRNFSQSGTLKRHLRTHTGEKPFQCRICMRNFSRNDKLVPHLKTHLRGSSAQ.

[0640] 56. The method of any one of the preceding embodiments, wherein the guide polynucleotide comprises two individual polynucleotides, wherein the two individual polynucleotides are two DNAs, two RNAs or a DNA and a RNA.
[0641] 57. The method of any one of the preceding embodiments, wherein the guide polynucleotides comprise a crRNA and a tracrRNA, wherein the crRNA comprises a nucleic acid sequence complementary to a target sequence in the SERPINA1 polynucleotide.
[0642] 58. The method of embodiment 57, wherein the target sequence comprises a sequence selected from the group consisting of GACAAGAAAGGGACTGAAGC (SEQ ID NO: 278), ATCGACAAGAAAGGGACTGA (SEQ ID NO: 279), and ACACACCGGTTGGTGGCCTC (SEQ ID NO: 280), or a complementary thereof
[0643] 59. The method of embodiment 57 or 58, wherein the base editor system comprises a single guide RNA (sgRNA).
[0644] 60. The method of embodiment 59, wherein the sgRNA comprises a sequence selected from the group consisting of ACTCTaGGCAGAGGTCTCAAAGG (SEQ ID NO: 9) and GCTCTaGGCCGAAGTGTCGCAGG (SEQ ID NO: 10).
[0645] 61. The method of any one of the preceding embodiments, wherein the base editor system comprises a vector comprising one or more of the guide polynucleotide, the polynucleotide programmable DNA binding domain, and the deaminase domain.
[0646] 62. The method of embodiment 61, wherein the vector is an adenovirus vector, an AAV vector, a lentivirus vector, or a retrovirus vector.
[0647] 63. A modified cell comprising a base editor system comprising
[0648] a guide polynucleotide or a nucleic acid encoding the guide polynucleotide;
[0649] a polynucleotide programmable DNA binding domain or a nucleic acid encoding the polynucleotide programmable DNA binding domain, and
[0650] an adenosine deaminase domain or a nucleic acid encoding the adenosine deaminase domain,
[0651] wherein the guide polynucleotide is capable of targeting the base editor system to effect an A⋅T to G⋅C alteration of a single nucleotide polymorphism (SNP) causative of Alpha-lantitrypsin deficiency (A1AD) in a SERPINA1 polynucleotide in the cell.
[0652] 64. A modified cell comprising a base editor system comprising
[0653] a guide polynucleotide or a nucleic acid encoding the guide polynucleotide;
[0654] a polynucleotide programmable DNA binding domain or a nucleic acid encoding the polynucleotide programmable DNA binding domain, and
[0655] an adenosine deaminase domain or a nucleic acid encoding the adenosine deaminase domain,
[0656] wherein the guide polynucleotide is capable of targeting the base editor system to effect an A⋅T to G⋅C alteration of a single nucleotide polymorphism (SNP) causative of Alpha-lantitrypsin deficiency (A1AD) in a SERPINA1 polynucleotide in the cell,
[0657] wherein the SERPINA1 polynucleotide encodes a A1AT protein comprising a lysine at position 324 resulted from the SNP,
[0658] wherein the A⋅T to G⋅C alteration substitutes the lysine with a wild type amino acid.
[0659] 65. The modified cell of embodiment 63, wherein the SERPINA1 polynucleotide encodes an A1AT protein comprising a lysine at position 342 resulted from the SNP.
[0660] 66. The modified cell of embodiment 65, wherein the A⋅T to G⋅C alteration substitutes the lysine with a wild type amino acid.
[0661] 67. The modified cell of any one of embodiment 63-66, wherein the cell is a hepatocyte or a progenitor thereof
[0662] 68. The modified cell of embodiments 67, wherein the cell is obtained from a subject having A1AD.
[0663] 69. The modified cell of any one of embodiments 66-68, wherein the wild type amino acid is a glutamic acid.
[0664] 70. The modified cell of any one of embodiments 63-66, wherein the polynucleotide programmable DNA binding domain is a Cas9 domain.
[0665] 71. The modified cell of embodiment 70, wherein the Cas9 domain is a nuclease inactive Cas9 domain.
[0666] 72. The modified cell of embodiment 71, wherein the Cas9 domain is a Cas9 nickase domain.
[0667] 73. The modified cell of any one of embodiments 70-72, wherein the Cas9 domain comprises a SpCas9 domain.
[0668] 74. The modified cell of embodiment 73, wherein the SpCas9 domain comprises a D10A and/or a H840A amino acid substitution or corresponding amino acid substitutions thereof
[0669] 75. The modified cell of embodiment 73 or 74, wherein the SpCas9 domain has specificity for a NGG PAM.
[0670] 76. The modified cell of any one of embodiments 73-75, wherein the SpCas9 domain has specificity for a NGA PAM, a NGT PAM, or a NGC PAM.
[0671] 77. The modified cell of any one of embodiments 73-76, wherein the SpCas9 domain comprises amino acid substitutions L1111R, D1135V, G1218R, E1219F, A1322R, R1335V, T1337R and one or more of L1111, D1135L, S1136R, G1218S, E1219V, D1332A, R1335Q, T13371, T1337V, T1337F, and T1337M or corresponding amino acid substitutions thereof
[0672] 78. The modified cell of any one of embodiments 73-76, wherein the SpCas9 domain comprises amino acid substitutions L1111R, D1135V, G1218R, E1219F, A1322R, R1335V, T1337R and one or more of L1111, D1135L, S1136R, G1218S, E1219V, D1332A, D1332S, D1332T, D1332V, D1332L, D1332K, D1332R, R1335Q, T13371, T1337V, T1337F, T1337S, T1337N, T1337K, T1337R, T1337H, T1337Q, and T1337M or corresponding amino acid substitutions thereof
[0673] 79. The modified cell of any one of embodiments 73-76, wherein the SpCas9 domain comprises amino acid substitutions D1135L, S1136R, G1218S, E1219V, A1322R, R1335Q, T1337, and A1322R, and one or more of L1111, D1135L, S1136R, G1218S, E1219V, D1332A, D1332S, D1332T, D1332V, D1332L, D1332K, D1332R, R1335Q, T13371, T1337V, T1337F, T1337S, T1337N, T1337K, T1337R, T1337H, T1337Q, and T1337M or or corresponding amino acid substitutions thereof
[0674] 80. The modified cell of any one of embodiments 73-76, wherein the SpCas9 domain comprises amino acid substitutions D1135M, S1136Q, G1218K, E1219F, A1322R, D1332A, R1335E, and T1337R, or corresponding amino acid substitutions thereof
[0675] 81. The modified cell of any one of embodiments 73-75, wherein the SpCas9 domain has specificity for a NG PAM, a NNG PAM, a GAA PAM, a GAT PAM, or a CAA PAM.
[0676] 82. The modified cell of embodiment 81, wherein the SpCas9 domain comprises amino acid substitutions E480K, E543K, and E1219V or corresponding amino acid substitutions thereof
[0677] 83. The modified cell of any one of embodiments 70-72, wherein the Cas9 domain comprises a SaCas9 domain.
[0678] 84. The modified cell of embodiment 83, wherein the SaCas9 domain has specificity for a NNNRRT PAM.
[0679] 85. The modified cell of embodiment 84, wherein the SaCas9 domain has specificity for a NNGRRT PAM.
[0680] 86. The modified cell of any one of embodiments 83-85, wherein the SaCas9 domain comprises an amino acid substitution N579A or a corresponding amino acid substitution thereof
[0681] 87. The modified cell of any one of embodiments 83-86, wherein the SaCas9 domain comprises amino acid substitutions E782K, N968K, and R1015H, or corresponding amino acid substitutions thereof
[0682] 88. The modified cell of any one of embodiments 70-72, wherein the Cas9 domain comprises a St1Cas9 domain:
[0683] 89. The modified cell of embodiment 88, wherein the St1Cas9 domain has specificity for a NNACCA PAM.
[0684] 90. The modified cell of any one of the preceding embodiments, wherein the adenosine deaminase domain is a modified adenosine deaminase domain that does not occur in nature.
[0685] 91. The modified cell of embodiment 90, wherein the adenosine deaminase domain comprises a TadA domain.
[0686] 92. The modified cell of embodiment 91, wherein the TadA domain comprises the amino acid sequence of TadA 7.10.
[0687] 93. The modified cell of any one embodiments 63-92, wherein the base editor system further comprises a zinc finger domain.
[0688] 94. The modified cell of embodiment 93, wherein the zinc finger domain comprises recognition helix sequences RNEHLEV (SEQ ID NO: 268), QSTTLKR (SEQ ID NO: 269), and RTEHLAR (SEQ ID NO: 270) or recognition helix sequences RGEHLRQ (SEQ ID NO: 271), QSGTLKR (SEQ ID NO: 272), and RNDKLVP (SEQ ID NO: 273).
[0689] 95. The modified cell of embodiment 93 or 94, wherein the zinc finger domain is zf1ra or zf1rb.
[0690] 96. The modified cell of any one of the preceding embodiments, wherein the base editor system further comprises a nuclear localization signal (NLS).
[0691] 97. The modified cell of any one embodiments 63-96, wherein the base editor system further comprises one or more linkers.
[0692] 98. The modified cell of embodiment 97, wherein two or more of the polynucleotide programmable DNA binding domain, the adenosine deaminase domain, the zinc finger domain, and the NLS are connected via a linker.
[0693] 99. The modified cell of embodiment 98, wherein the linker is a peptide linker, thereby forming a base editing fusion protein.
[0694] 100. The modified cell of embodiment 99, wherein the peptide linker comprises an amino acid sequence selected from the group consisting of SGGSSGSETPGTSESATPESSGGS (SEQ ID NO: 32), SGGSSGGSSGSETPGTSESATPESSGGSSGGS (SEQ ID NO: 33), GGSGGSPGSPAGSPTSTEEGTSESATPESGPGTSTEPSEGSAPGSPAGSPTSTEEGTSTEPS EGSAPGTSTEPSEGSAPGTSESATPESGPGSEPATSGGSGGS (SEQ ID NO: 34), SGGSSGGSSGSETPGTSESATPES (SEQ ID NO: 35), SGGSSGGSSGSETPGTSESATPESSGGSSGGSSGGSSGGS (SEQ ID NO: 36), SGGSSGGSSGSETPGTSESATPESSGGSSGGSSGGSSGGSSGSETPGTSESATPESSGGSSG GS (SEQ ID NO: 37), PGSPAGSPTSTEEGTSESATPESGPGTSTEPSEGSAPGSPAGSPTSTEEGTSTEPSEGSAP GTSTEPSEGSAPGTSESATPESGPGSEPATS (SEQ ID NO: 38), (SGGS)n (SEQ ID NO: 297), (GGGS)n (SEQ ID NO: 298), (GGGGS)n (SEQ ID NO: 299), (G)n, (EAAAK)n (SEQ ID NO: 300), (GGS)n, SGSETPGTSESATPES (SEQ ID NO: 16), and (XP)n.
[0695] 101. The modified cell of embodiment 99 or 100, wherein the base editing fusion protein comprises the amino acid sequence selected from the group consisting of

(SEQ ID NO: 274)
MPKKKRKVSEVEFSHEYWMRHALTLAKRAWDEREVPVGAVLVHNNRVIGEGWNRPI
GRHDPTAHAEIMALRQGGLVMQNYRLIDATLYVTLEPCVMCAGAMIHSRIGRVVFGAR
DAKTGAAGSLMDVLHHPGMNHRVEITEGILADECAALLSDFFRMRRQEIKAQKKAQSS
TDSGGSSGGSSGSETPGTSESATPESSGGSSGGSSEVEFSHEYWMRHALTLAKRARDER
EVPVGAVLVLNNRVIGEGWNRAIGLHDPTAHAEIMALRQGGLVMQNYRLIDATLYVTF
EPCVMCAGAMIHSRIGRVVFGVRNAKTGAAGSLMDVLHYPGMNHRVEITEGILADECA
ALLCYFFRMPRQVFNAQKKAQSSTDSGGSSGGSSGSETPGTSESATPESDLVLGLAIGIG
SVGVGILNKVTGEIIHKNSRIFPAAQAENNLVRRTNRQGRRLARRKKHRRVRLNRLFEE
SGLITDFTKISINLNPYQLRVKGLTDELSNEELFIALKNMVKHRGISYLDDASDDGNSSV
GDYAQIVKENSKQLETKTPGQIQLERYQTYGQLRGDFTVEKDGKKHRLINVFPTSAYRS
EALRILQTQQEFNPQITDEFINRYLEILTGKRKYYHGPGNEKSRTDYGRYRTSGETLDNIF
GILIGKCTFYPDEFRAAKASYTAQEFNLLNDLNNLTVPTETKKLSKEQKNQIINYVKNEK
AMGPAKLFKYIAKLLSCDVADIKGYRIDKSGKAEIHTFEAYRKMKTLETLDIEQMDRET
LDKLAYVLTLNTEREGIQEALEHEFADGSFSQKQVDELVQFRKANSSIFGKGWHNFSVK
LMMELIPELYETSEEQMTILTRLGKQKTTSSSNKTKYIDEKLLTEEIYNPVVAKSVRQAI
KIVNAAIKEYGDFDNIVIEMARETNEDDEKKAIQKIQKANKDEKDAAMLKAANQYNGK
AELPHSVFHGHKQLATKIRLWHQQGERCLYTGKTISIHDLINNSNQFEVDHILPLSITFDD
SLANKVLVYATANQEKGQRTPYQALDSMDDAWSFRELKAFVRESKTLSNKKKEYLLT
EEDISKFDVRKKFIERNLVDTLYASRVVLNALQEHFRAHKIDTKVSVVRGQFTSQLRRH
WGIEKTRDTYHHHAVDALIIAASSQLNLWKKQKNTLVSYSEDQLLDIETGELISDDEYK
ESVFKAPYQHFVDTLKSKEFEDSILFSYQVDSKFNRKISDATIYATRQAKVGKDKADET
YVLGKIKDIYTQDGYDAFMKIYKKDKSKFLMYRHDPQTFEKVIEPILENYPNKQINDKG
KEVPCNPFLKYKEEHGYIRKYSKKGNGPEIKSLKYYDSKLGNHIDITPKDSNNKVVLQS
VSPWRADVYFNKTTGKYEILGLKYADLQFDKGTGTYKISQEKYNDIKKKEGVDSDSEF
KFTLYKNDLLLVKDTETKEQQLFRFLSRTMPKQKHYVELKPYDKQKFEGGEALIKVLG
NVANSGQCKKGLGKSNISIYKVRTDVLGNQHIIKNEGDKPKLDFPKKKRKVEGADKRT
ADGSEFESPKKKRKV,
(SEQ ID NO: 275)
MSEVEFSHEYWMRHALTLAKRAWDEREVPVGAVLVHNNRVIGEGWNRPIGRHDPTA
HAEIMALRQGGLVMQNYRLIDATLYVTLEPCVMCAGAMIHSRIGRVVFGARDAKTGA
AGSLMDVLHHPGMNHRVEITEGILADECAALLSDFFRMRRQEIKAQKKAQSSTDSGGSS
GGSSGSETPGTSESATPESSGGSSGGSSEVEFSHEYWMRHALTLAKRARDEREVPVGAV
LVLNNRVIGEGWNRAIGLHDPTAHAEIMALRQGGLVMQNYRLIDATLYVTFEPCVMCA
GAMIHSRIGRVVFGVRNAKTGAAGSLMDVLHYPGMNHRVEITEGILADECAALLCYFF
RMPRQVFNAQKKAQSSTDSGGSSGGSSGSETPGTSESATPESSGGSSGGSKRNYILGLAI
GITSVGYGIIDYETRDVIDAGVRLFKEANVENNEGRRSKRGARRLKRRRRHRIQRVKKL
LFDYNLLTDHSELSGINPYEARVKGLSQKLSEEEFSAALLHLAKRRGVHNVNEVEEDTG
NELSTKEQISRNSKALEEKYVAELQLERLKKDGEVRGSINRFKTSDYVKEAKQLLKVQK
AYHQLDQSFIDTYIDLLETRRTYYEGPGEGSPFGWKDIKEWYEMLMGHCTYFPEELRSV
KYAYNADLYNALNDLNNLVITRDENEKLEYYEKFQIIENVFKQKKKPTLKQIAKEILVN
EEDIKGYRVTSTGKPEFTNLKVYHDIKDITARKEIIENAELLDQIAKILTIYQSSEDIQEEL
TNLNSELTQEEIEQISNLKGYTGTHNLSLKAINLILDELWHTNDNQIAIFNRLKLVPKKV
DLSQQKEIPTTLVDDFILSPVVKRSFIQSIKVINAIIKKYGLPNDIIIELAREKNSKDAQKMI
NEMQKRNRQTNERIEEIIRTTGKENAKYLIEKIKLHDMQEGKCLYSLEAIPLEDLLNNPF
NYEVDHIIPRSVSFDNSFNNKVLVKQEENSKKGNRTPFQYLSSSDSKISYETFKKHILNLA
KGKGRISKTKKEYLLEERDINRFSVQKDFINRNLVDTRYATRGLMNLLRSYFRVNNLDV
KVKSINGGFTSFLRRKWKFKKERNKGYKHHAEDALIIANADFIFKEWKKLDKAKKVME
NQMFEEKQAESMPEIETEQEYKEIFITPHQIKHIKDFKDYKYSHRVDKKPNRKLINDTLY
STRKDDKGNTLIVNNLNGLYDKDNDKLKKLINKSPEKLLMYHHDPQTYQKLKLIMEQY
GDEKNPLYKYYEETGNYLTKYSKKDNGPVIKKIKYYGNKLNAHLDITDDYPNSRNKVV
KLSLKPYRFDVYLDNGVYKFVTVKNLDVIKKENYYEVNSKCYEEAKKLKKISNQAEFI
ASFYKNDLIKINGELYRVIGVNNDLLNRIEVNMIDITYREYLENMNDKRPPHIIKTIASKT
QSIKKYSTDILGNLYEVKSKKHPQIIKKGEGADKRTADGSEFESPKKKRKV,
(SEQ ID NO: 276)
MSEVEFSHEYWMRHALTLAKRAWDEREVPVGAVLVHNNRVIGEGWNRPIGRH
DPTAHAEIMALRQGGLVMQNYRLIDATLYVTLEPCVMCAGAMIHSRIGRVVFGARDA
KTGAAGSLMDVLHHPGMNHRVEITEGILADECAALLSDFFRMRRQEIKAQKKAQSSTD
SGGSSGGSSGSETPGTSESATPESSGGSSGGSSEVEFSHEYWMRHALTLAKRARDEREVP
VGAVLVLNNRVIGEGWNRAIGLHDPTAHAEIMALRQGGLVMQNYRLIDATLYVTFEPC
VMCAGAMIHSRIGRVVFGVRNAKTGAAGSLMDVLHYPGMNHRVEITEGILADECAAL
LCYFFRMPRQVFNAQKKAQSSTDSGGSSGGSSGSETPGTSESATPESSGGSSGGSKRNYI
LGLAIGITSVGYGIIDYETRDVIDAGVRLFKEANVENNEGRRSKRGARRLKRRRRHRIQR
VKKLLFDYNLLTDHSELSGINPYEARVKGLSQKLSEEEFSAALLHLAKRRGVHNVNEVE
EDTGNELSTKEQISRNSKALEEKYVAELQLERLKKDGEVRGSINRFKTSDYVKEAKQLL
KVQKAYHQLDQSFIDTYIDLLETRRTYYEGPGEGSPFGWKDIKEWYEMLMGHCTYFPE
ELRSVKYAYNADLYNALNDLNNLVITRDENEKLEYYEKFQIIENVFKQKKKPTLKQIAK
EILVNEEDIKGYRVTSTGKPEFTNLKVYHDIKDITARKEIIENAELLDQIAKILTIYQSSEDI
QEELTNLNSELTQEEIEQISNLKGYTGTHNLSLKAINLILDELWHTNDNQIAIFNRLKLVP
KKVDLSQQKEIPTTLVDDFILSPVVKRSFIQSIKVINAIIKKYGLPNDIIIELAREKNSKDAQ
KMINEMQKRNRQTNERIEEIIRTTGKENAKYLIEKIKLHDMQEGKCLYSLEAIPLEDLLN
NPFNYEVDHIIPRSVSFDNSFNNKVLVKQEENSKKGNRTPFQYLSSSDSKISYETFKKHIL
NLAKGKGRISKTKKEYLLEERDINRFSVQKDFINRNLVDTRYATRGLMNLLRSYFRVNN
LDVKVKSINGGFTSFLRRKWKFKKERNKGYKHHAEDALIIANADFIFKEWKKLDKAKK
VMENQMFEEKQAESMPEIETEQEYKEIFITPHQIKHIKDFKDYKYSHRVDKKPNRKLIND
TLYSTRKDDKGNTLIVNNLNGLYDKDNDKLKKLINKSPEKLLMYHHDPQTYQKLKLIM
EQYGDEKNPLYKYYEETGNYLTKYSKKDNGPVIKKIKYYGNKLNAHLDITDDYPNSRN
KVVKLSLKPYRFDVYLDNGVYKFVTVKNLDVIKKENYYEVNSKCYEEAKKLKKISNQ
AEFIASFYKNDLIKINGELYRVIGVNNDLLNRIEVNMIDITYREYLENMNDKRPPHIIKTI
ASKTQSIKKYSTDILGNLYEVKSKKHPQIIKKGEGADKRTADGSEFESPKKKRKVSSGNS
NANSRGPSFSSGLVPLSLRGSHSRPGERPFQCRICMRNFSRNEHLEVHTRTHTGEKPFQC
RICMRNFSQSTTLKRHLRTHTGEKPFQCRICMRNFSRTEHLARHLKTHLRGSSAQ,
or
(SEQ ID NO: 277)
MSEVEFSHEYWMRHALTLAKRAWDEREVPVGAVLVHNNRVIGEGWNRPIGRH
DPTAHAEIMALRQGGLVMQNYRLIDATLYVTLEPCVMCAGAMIHSRIGRVVFGARDA
KTGAAGSLMDVLHHPGMNHRVEITEGILADECAALLSDFFRMRRQEIKAQKKAQSSTD
SGGSSGGSSGSETPGTSESATPESSGGSSGGSSEVEFSHEYWMRHALTLAKRARDEREVP
VGAVLVLNNRVIGEGWNRAIGLHDPTAHAEIMALRQGGLVMQNYRLIDATLYVTFEPC
VMCAGAMIHSRIGRVVFGVRNAKTGAAGSLMDVLHYPGMNHRVEITEGILADECAAL
LCYFFRMPRQVFNAQKKAQSSTDSGGSSGGSSGSETPGTSESATPESSGGSSGGSKRNYI
LGLAIGITSVGYGIIDYETRDVIDAGVRLFKEANVENNEGRRSKRGARRLKRRRRHRIQR
VKKLLFDYNLLTDHSELSGINPYEARVKGLSQKLSEEEFSAALLHLAKRRGVHNVNEVE
EDTGNELSTKEQISRNSKALEEKYVAELQLERLKKDGEVRGSINRFKTSDYVKEAKQLL
KVQKAYHQLDQSFIDTYIDLLETRRTYYEGPGEGSPFGWKDIKEWYEMLMGHCTYFPE
ELRSVKYAYNADLYNALNDLNNLVITRDENEKLEYYEKFQIIENVFKQKKKPTLKQIAK
EILVNEEDIKGYRVTSTGKPEFTNLKVYHDIKDITARKEIIENAELLDQIAKILTIYQSSEDI
QEELTNLNSELTQEEIEQISNLKGYTGTHNLSLKAINLILDELWHTNDNQIAIFNRLKLVP
KKVDLSQQKEIPTTLVDDFILSPVVKRSFIQSIKVINAIIKKYGLPNDIIIELAREKNSKDAQ
KMINEMQKRNRQTNERIEEIIRTTGKENAKYLIEKIKLHDMQEGKCLYSLEAIPLEDLLN
NPFNYEVDHIIPRSVSFDNSFNNKVLVKQEENSKKGNRTPFQYLSSSDSKISYETFKKHIL
NLAKGKGRISKTKKEYLLEERDINRFSVQKDFINRNLVDTRYATRGLMNLLRSYFRVNN
LDVKVKSINGGFTSFLRRKWKFKKERNKGYKHHAEDALIIANADFIFKEWKKLDKAKK
VMENQMFEEKQAESMPEIETEQEYKEIFITPHQIKHIKDFKDYKYSHRVDKKPNRKLIND
TLYSTRKDDKGNTLIVNNLNGLYDKDNDKLKKLINKSPEKLLMYHHDPQTYQKLKLIM
EQYGDEKNPLYKYYEETGNYLTKYSKKDNGPVIKKIKYYGNKLNAHLDITDDYPNSRN
KVVKLSLKPYRFDVYLDNGVYKFVTVKNLDVIKKENYYEVNSKCYEEAKKLKKISNQ
AEFIASFYKNDLIKINGELYRVIGVNNDLLNRIEVNMIDITYREYLENMNDKRPPHIIKTI
ASKTQSIKKYSTDILGNLYEVKSKKHPQIIKKGEGADKRTADGSEFESPKKKRKVSSGNS
NANSRGPSFSSGLVPLSLRGSHSRPGERPFQCRICMRNFSRGEHLRQHTRTHTGEKPFQC
RICMRNFSQSGTLKRHLRTHTGEKPFQCRICMRNFSRNDKLVPHLKTHLRGSSAQ.

[0696] 102. The modified cell of any one of embodiments 63-101, wherein the guide polynucleotide comprises two individual polynucleotides, wherein the two individual polynucleotides are two DNAs, two RNAs or a DNA and a RNA.
[0697] 103. The modified cell of any one of the preceding embodiments, wherein the guide polynucleotides comprise a crRNA and a tracrRNA, wherein the crRNA comprises a nucleic acid sequence complementary to a target sequence in the SERPINA1 polynucleotide.
[0698] 104. The modified cell of embodiment 103, wherein the target sequence comprises a sequence selected from the group consisting of GACAAGAAAGGGACTGAAGC (SEQ ID NO: 278), ATCGACAAGAAAGGGACTGA (SEQ ID NO: 279), and ACACACCGGTTGGTGGCCTC (SEQ ID NO: 280), or a complementary thereof
[0699] 105. The modified cell of embodiment 102 or 103, wherein the base editor system comprises a single guide RNA (sgRNA).
[0700] 106. The modified cell of embodiment 105, wherein the sgRNA comprises a sequence selected from the group consisting of ACTCTaGGCAGAGGTCTCAAAGG (SEQ ID NO: 9) and GCTCTaGGCCGAAGTGTCGCAGG (SEQ ID NO: 10).
[0701] 107. The modified cell of any one of embodiments 63-106, wherein the base editor system comprises a vector comprising one or more of the guide polynucleotide, the polynucleotide programmable DNA binding domain, and the deaminase domain.
[0702] 108. The modified cell of embodiment 107, wherein the vector is an adenovirus vector, an AAV vector, a lentivirus vector, or a retrovirus vector.
[0703] 109. A base editor system comprising
[0704] a guide polynucleotide or a nucleic acid encoding the guide polynucleotide;
[0705] a polynucleotide programmable DNA binding domain or a nucleic acid encoding the polynucleotide programmable DNA binding domain, and
[0706] an adenosine deaminase domain or a nucleic acid encoding the adenosine deaminase domain,
[0707] wherein the guide polynucleotide is capable of targeting the base editor system to effect an A⋅T to G⋅C alteration of a single nucleotide polymorphism (SNP) causative of Alpha-lantitrypsin deficiency (A1AD) in a SERPINA1 polynucleotide.
[0708] 110. A base editor system comprising
[0709] a guide polynucleotide or a nucleic acid encoding the guide polynucleotide;
[0710] a polynucleotide programmable DNA binding domain or a nucleic acid encoding the polynucleotide programmable DNA binding domain, and
[0711] an adenosine deaminase domain or a nucleic acid encoding the adenosine deaminase domain,
[0712] wherein the guide polynucleotide is capable of targeting the base editor system to effect an A⋅T to G⋅C alteration of a single nucleotide polymorphism (SNP) causative of Alpha-lantitrypsin deficiency (A1AD) in a SERPINA1 polynucleotide,
[0713] wherein the SERPINA1 polynucleotide encodes a A1AT protein comprising a lysine at position 324 resulted from the SNP,
[0714] wherein the A⋅T to G⋅C alteration substitutes the lysine with a wild type amino acid.
[0715] 111. The base editor system of embodiment 109, wherein the SERPINA1 polynucleotide encodes an A1AT protein comprising a lysine at position 342 resulted from the SNP.
[0716] 112. The base editor system of embodiment 111, wherein the A⋅T to G⋅C alteration substitutes the lysine with a wild type amino acid.
[0717] 113. The base editor system of embodiment 110 or 112, wherein the wild type amino acid is a glutamic acid.
[0718] 114. The base editor system of any one of embodiments 109-113, wherein the polynucleotide programmable DNA binding domain is a Cas9 domain.
[0719] 115. The base editor system of embodiment 114, wherein the Cas9 domain is a nuclease inactive Cas9 domain.
[0720] 116. The base editor system of embodiment 114, wherein the Cas9 domain is a Cas9 nickase domain.
[0721] 117. The base editor system of any one of embodiments 114-116, wherein the Cas9 domain comprises a SpCas9 domain.
[0722] 118. The base editor system of embodiment 117, wherein the SpCas9 domain comprises a D10A and/or a H840A amino acid substitution or corresponding amino acid substitutions thereof
[0723] 119. The base editor system of embodiment 117 or 118, wherein the SpCas9 domain has specificity for a NGG PAM.
[0724] 120. The base editor system of any one of embodiments 117-119, wherein the SpCas9 domain has specificity for a NGA PAM, a NGT PAM, or a NGC PAM.
[0725] 121. The base editor system of any one of embodiments 117-119, wherein the SpCas9 domain comprises amino acid substitutions L1111R, D1135V, G1218R, E1219F, A1322R, R1335V, T1337R and one or more of L1111, D1135L, S1136R, G1218S, E1219V, D1332A, R1335Q, T13371, T1337V, T1337F, and T1337M or corresponding amino acid substitutions thereof
[0726] 122. The base editor system of any one of embodiments 117-119, wherein the SpCas9 domain comprises amino acid substitutions L1111R, D1135V, G1218R, E1219F, A1322R, R1335V, T1337R and one or more of L1111, D1135L, S1136R, G1218S, E1219V, D1332A, D1332S, D1332T, D1332V, D1332L, D1332K, D1332R, R1335Q, T13371, T1337V, T1337F, T1337S, T1337N, T1337K, T1337R, T1337H, T1337Q, and T1337M or corresponding amino acid substitutions thereof
[0727] 123. The base editor system of any one of embodiments 117-119, wherein the SpCas9 domain comprises amino acid substitutions D1135L, S1136R, G1218S, E1219V, A1322R, R1335Q, T1337, and A1322R, and one or more of L1111, D1135L, S1136R, G1218S, E1219V, D1332A, D1332S, D1332T, D1332V, D1332L, D1332K, D1332R, R1335Q, T13371, T1337V, T1337F, T1337S, T1337N, T1337K, T1337R, T1337H, T1337Q, and T1337M or or corresponding amino acid substitutions thereof
[0728] 124. The base editor system of any one of embodiments 117-119, wherein the SpCas9 domain comprises amino acid substitutions D1135M, S1136Q, G1218K, E1219F, A1322R, D1332A, R1335E, and T1337R, or corresponding amino acid substitutions thereof
[0729] 125. The base editor system of any one of embodiments 117-119, wherein the SpCas9 domain has specificity for a NG PAM, a NNG PAM, a GAA PAM, a GAT PAM, or a CAA PAM.
[0730] 126. The base editor system of embodiment 125, wherein the SpCas9 domain comprises amino acid substitutions E480K, E543K, and E1219V or corresponding amino acid substitutions thereof 127. The base editor system of any one of embodiments 114-116, wherein the Cas9 domain comprises a SaCas9 domain.
[0731] 128. The base editor system of embodiment 127, wherein the SaCas9 domain has specificity for a NNNRRT PAM.
[0732] 129. The base editor system of embodiment 128, wherein the SaCas9 domain has specificity for a NNGRRT PAM.
[0733] 130. The base editor system of any one of embodiments 127-129, wherein the SaCas9 domain comprises an amino acid substitution N579A or a corresponding amino acid substitution thereof
[0734] 131. The base editor system of any one of embodiments 127-130, wherein the SaCas9 domain comprises amino acid substitutions E782K, N968K, and R1015H, or corresponding amino acid substitutions thereof
[0735] 132. The base editor system of any one of embodiments 117-119, wherein the Cas9 domain comprises a St1Cas9 domain:
[0736] 133. The base editor system of embodiment 132, wherein the St1Cas9 domain has specificity for a NNACCA PAM.
[0737] 134. The base editor system of any one of embodiments, wherein the adenosine deaminase domain is a modified adenosine deaminase domain that does not occur in nature.
[0738] 135. The base editor system of embodiment 90, wherein the adenosine deaminase domain comprises a TadA domain.
[0739] 136. The base editor system of embodiment 91, wherein the TadA domain comprises the amino acid sequence of TadA 7.10.
[0740] 137. The base editor system of any one of embodiments 109-136, wherein the base editor system further comprises a zinc finger domain.
[0741] 138. The base editor system of embodiment 137, wherein the zinc finger domain comprises recognition helix sequences RNEHLEV (SEQ ID NO: 268), QSTTLKR (SEQ ID NO: 269), and RTEHLAR (SEQ ID NO: 270) or recognition helix sequences RGEHLRQ (SEQ ID NO: 271), QSGTLKR (SEQ ID NO: 272), and RNDKLVP (SEQ ID NO: 273).
[0742] 139. The base editor system of embodiment 136 or 137, wherein the zinc finger domain is zf1ra or zf1rb.
[0743] 140. The base editor system of any one of the preceding embodiments, wherein the base editor system further comprises a nuclear localization signal (NLS).
[0744] 141. The base editor system of any one of embodiments 109-140, wherein the base editor system further comprises one or more linkers.
[0745] 142. The base editor system of embodiment 141, wherein two or more of the polynucleotide programmable DNA binding domain, the adenosine deaminase domain, the zinc finger domain, and the NLS are connected via a linker.
[0746] 143. The base editor system of embodiment 142, wherein the linker is a peptide linker, thereby forming a base editing fusion protein.
[0747] 144. The base editor system of embodiment 143, wherein the peptide linker comprises an amino acid sequence selected from the group consisting of

(SEQ ID NO: 32)
SGGSSGSETPGTSESATPESSGGS,
(SEQ ID NO: 33)
SGGSSGGSSGSETPGTSESATPESSGGSSGGS,
(SEQ ID NO: 34)
GGSGGSPGSPAGSPTSTEEGTSESATPESGPGTSTEPSEGSAPGSPAGSP
TSTEEGTSTEPSEGSAPGTSTEPSEGSAPGTSESATPESGPGSEPATSGG
SGGS,
(SEQ ID NO: 35)
SGGSSGGSSGSETPGTSESATPES,
(SEQ ID NO: 36)
SGGSSGGSSGSETPGTSESATPESSGGSSGGSSGGSSGGS,
(SEQ ID NO: 37)
SGGSSGGSSGSETPGTSESATPESSGGSSGGSSGGSSGGSSGSETPGTSE
SATPESSGGSSGGS,
(SEQ ID NO: 38)
PGSPAGSPTSTEEGTSESATPESGPGTSTEPSEGSAPGSPAGSPTSTEEG
TSTEPSEGSAPGTSTEPSEGSAPGTSESATPESGPGSEPATS,
(SEQ ID NO: 297)
(SGGS)n,
(SEQ ID NO: 298)
(GGGS)n,
(SEQ ID NO: 299)
(GGGGS)n,
(SEQ ID NO: 300)
(G)n,
(EAAAK)n,
(SEQ ID NO: 16)
(GGS)n,
SGSETPGTSESATPES,
and
(XP)n.

[0748] 145. The base editor system of embodiment 143 or 144, wherein the base editing fusion protein comprises the amino acid sequence selected from the group consisting of

(SEQ ID NO: 274)
MPKKKRKVSEVEFSHEYWMRHALTLAKRAWDEREVPVGAVLVHNNRVIGEGWNRPI
GRHDPTAHAEIMALRQGGLVMQNYRLIDATLYVTLEPCVMCAGAMIHSRIGRVVFGAR
DAKTGAAGSLMDVLHHPGMNHRVEITEGILADECAALLSDFFRMRRQEIKAQKKAQSS
TDSGGSSGGSSGSETPGTSESATPESSGGSSGGSSEVEFSHEYWMRHALTLAKRARDER
EVPVGAVLVLNNRVIGEGWNRAIGLHDPTAHAEIMALRQGGLVMQNYRLIDATLYVTF
EPCVMCAGAMIHSRIGRVVFGVRNAKTGAAGSLMDVLHYPGMNHRVEITEGILADECA
ALLCYFFRMPRQVFNAQKKAQSSTDSGGSSGGSSGSETPGTSESATPESDLVLGLAIGIG
SVGVGILNKVTGEIIHKNSRIFPAAQAENNLVRRTNRQGRRLARRKKHRRVRLNRLFEE
SGLITDFTKISINLNPYQLRVKGLTDELSNEELFIALKNMVKHRGISYLDDASDDGNSSV
GDYAQIVKENSKQLETKTPGQIQLERYQTYGQLRGDFTVEKDGKKHRLINVFPTSAYRS
EALRILQTQQEFNPQITDEFINRYLEILTGKRKYYHGPGNEKSRTDYGRYRTSGETLDNIF
GILIGKCTFYPDEFRAAKASYTAQEFNLLNDLNNLTVPTETKKLSKEQKNQIINYVKNEK
AMGPAKLFKYIAKLLSCDVADIKGYRIDKSGKAEIHTFEAYRKMKTLETLDIEQMDRET
LDKLAYVLTLNTEREGIQEALEHEFADGSFSQKQVDELVQFRKANSSIFGKGWHNFSVK
LMMELIPELYETSEEQMTILTRLGKQKTTSSSNKTKYIDEKLLTEEIYNPVVAKSVRQAI
KIVNAAIKEYGDFDNIVIEMARETNEDDEKKAIQKIQKANKDEKDAAMLKAANQYNGK
AELPHSVFHGHKQLATKIRLWHQQGERCLYTGKTISIHDLINNSNQFEVDHILPLSITFDD
SLANKVLVYATANQEKGQRTPYQALDSMDDAWSFRELKAFVRESKTLSNKKKEYLLT
EEDISKFDVRKKFIERNLVDTLYASRVVLNALQEHFRAHKIDTKVSVVRGQFTSQLRRH
WGIEKTRDTYHHHAVDALIIAASSQLNLWKKQKNTLVSYSEDQLLDIETGELISDDEYK
ESVFKAPYQHFVDTLKSKEFEDSILFSYQVDSKFNRKISDATIYATRQAKVGKDKADET
YVLGKIKDIYTQDGYDAFMKIYKKDKSKFLMYRHDPQTFEKVIEPILENYPNKQINDKG
KEVPCNPFLKYKEEHGYIRKYSKKGNGPEIKSLKYYDSKLGNHIDITPKDSNNKVVLQS
VSPWRADVYFNKTTGKYEILGLKYADLQFDKGTGTYKISQEKYNDIKKKEGVDSDSEF
KFTLYKNDLLLVKDTETKEQQLFRFLSRTMPKQKHYVELKPYDKQKFEGGEALIKVLG
NVANSGQCKKGLGKSNISIYKVRTDVLGNQHIIKNEGDKPKLDFPKKKRKVEGADKRT
ADGSEFESPKKKRKV,
(SEQ ID NO: 275)
MSEVEFSHEYWMRHALTLAKRAWDEREVPVGAVLVHNNRVIGEGWNRPIGRHDPTA
HAEIMALRQGGLVMQNYRLIDATLYVTLEPCVMCAGAMIHSRIGRVVFGARDAKTGA
AGSLMDVLHHPGMNHRVEITEGILADECAALLSDFFRMRRQEIKAQKKAQSSTDSGGSS
GGSSGSETPGTSESATPESSGGSSGGSSEVEFSHEYWMRHALTLAKRARDEREVPVGAV
LVLNNRVIGEGWNRAIGLHDPTAHAEIMALRQGGLVMQNYRLIDATLYVTFEPCVMCA
GAMIHSRIGRVVFGVRNAKTGAAGSLMDVLHYPGMNHRVEITEGILADECAALLCYFF
RMPRQVFNAQKKAQSSTDSGGSSGGSSGSETPGTSESATPESSGGSSGGSKRNYILGLAI
GITSVGYGIIDYETRDVIDAGVRLFKEANVENNEGRRSKRGARRLKRRRRHRIQRVKKL
LFDYNLLTDHSELSGINPYEARVKGLSQKLSEEEFSAALLHLAKRRGVHNVNEVEEDTG
NELSTKEQISRNSKALEEKYVAELQLERLKKDGEVRGSINRFKTSDYVKEAKQLLKVQK
AYHQLDQSFIDTYIDLLETRRTYYEGPGEGSPFGWKDIKEWYEMLMGHCTYFPEELRSV
KYAYNADLYNALNDLNNLVITRDENEKLEYYEKFQIIENVFKQKKKPTLKQIAKEILVN
EEDIKGYRVTSTGKPEFTNLKVYHDIKDITARKEIIENAELLDQIAKILTIYQSSEDIQEEL
TNLNSELTQEEIEQISNLKGYTGTHNLSLKAINLILDELWHTNDNQIAIFNRLKLVPKKV
DLSQQKEIPTTLVDDFILSPVVKRSFIQSIKVINAIIKKYGLPNDIIIELAREKNSKDAQKMI
NEMQKRNRQTNERIEEIIRTTGKENAKYLIEKIKLHDMQEGKCLYSLEAIPLEDLLNNPF
NYEVDHIIPRSVSFDNSFNNKVLVKQEENSKKGNRTPFQYLSSSDSKISYETFKKHILNLA
KGKGRISKTKKEYLLEERDINRFSVQKDFINRNLVDTRYATRGLMNLLRSYFRVNNLDV
KVKSINGGFTSFLRRKWKFKKERNKGYKHHAEDALIIANADFIFKEWKKLDKAKKVME
NQMFEEKQAESMPEIETEQEYKEIFITPHQIKHIKDFKDYKYSHRVDKKPNRKLINDTLY
STRKDDKGNTLIVNNLNGLYDKDNDKLKKLINKSPEKLLMYHHDPQTYQKLKLIMEQY
GDEKNPLYKYYEETGNYLTKYSKKDNGPVIKKIKYYGNKLNAHLDITDDYPNSRNKVV
KLSLKPYRFDVYLDNGVYKFVTVKNLDVIKKENYYEVNSKCYEEAKKLKKISNQAEFI
ASFYKNDLIKINGELYRVIGVNNDLLNRIEVNMIDITYREYLENMNDKRPPHIIKTIASKT
QSIKKYSTDILGNLYEVKSKKHPQIIKKGEGADKRTADGSEFESPKKKRKV,
(SEQ ID NO: 276)
MSEVEFSHEYWMRHALTLAKRAWDEREVPVGAVLVHNNRVIGEGWNRPIGRH
DPTAHAEIMALRQGGLVMQNYRLIDATLYVTLEPCVMCAGAMIHSRIGRVVFGARDA
KTGAAGSLMDVLHHPGMNHRVEITEGILADECAALLSDFFRMRRQEIKAQKKAQSSTD
SGGSSGGSSGSETPGTSESATPESSGGSSGGSSEVEFSHEYWMRHALTLAKRARDEREVP
VGAVLVLNNRVIGEGWNRAIGLHDPTAHAEIMALRQGGLVMQNYRLIDATLYVTFEPC
VMCAGAMIHSRIGRVVFGVRNAKTGAAGSLMDVLHYPGMNHRVEITEGILADECAAL
LCYFFRMPRQVFNAQKKAQSSTDSGGSSGGSSGSETPGTSESATPESSGGSSGGSKRNYI
LGLAIGITSVGYGIIDYETRDVIDAGVRLFKEANVENNEGRRSKRGARRLKRRRRHRIQR
VKKLLFDYNLLTDHSELSGINPYEARVKGLSQKLSEEEFSAALLHLAKRRGVHNVNEVE
EDTGNELSTKEQISRNSKALEEKYVAELQLERLKKDGEVRGSINRFKTSDYVKEAKQLL
KVQKAYHQLDQSFIDTYIDLLETRRTYYEGPGEGSPFGWKDIKEWYEMLMGHCTYFPE
ELRSVKYAYNADLYNALNDLNNLVITRDENEKLEYYEKFQIIENVFKQKKKPTLKQIAK
EILVNEEDIKGYRVTSTGKPEFTNLKVYHDIKDITARKEIIENAELLDQIAKILTIYQSSEDI
QEELTNLNSELTQEEIEQISNLKGYTGTHNLSLKAINLILDELWHTNDNQIAIFNRLKLVP
KKVDLSQQKEIPTTLVDDFILSPVVKRSFIQSIKVINAIIKKYGLPNDIIIELAREKNSKDAQ
KMINEMQKRNRQTNERIEEIIRTTGKENAKYLIEKIKLHDMQEGKCLYSLEAIPLEDLLN
NPFNYEVDHIIPRSVSFDNSFNNKVLVKQEENSKKGNRTPFQYLSSSDSKISYETFKKHIL
NLAKGKGRISKTKKEYLLEERDINRFSVQKDFINRNLVDTRYATRGLMNLLRSYFRVNN
LDVKVKSINGGFTSFLRRKWKFKKERNKGYKHHAEDALIIANADFIFKEWKKLDKAKK
VMENQMFEEKQAESMPEIETEQEYKEIFITPHQIKHIKDFKDYKYSHRVDKKPNRKLIND
TLYSTRKDDKGNTLIVNNLNGLYDKDNDKLKKLINKSPEKLLMYHHDPQTYQKLKLIM
EQYGDEKNPLYKYYEETGNYLTKYSKKDNGPVIKKIKYYGNKLNAHLDITDDYPNSRN
KVVKLSLKPYRFDVYLDNGVYKFVTVKNLDVIKKENYYEVNSKCYEEAKKLKKISNQ
AEFIASFYKNDLIKINGELYRVIGVNNDLLNRIEVNMIDITYREYLENMNDKRPPHIIKTI
ASKTQSIKKYSTDILGNLYEVKSKKHPQIIKKGEGADKRTADGSEFESPKKKRKVSSGNS
NANSRGPSFSSGLVPLSLRGSHSRPGERPFQCRICMRNFSRNEHLEVHTRTHTGEKPFQC
RICMRNFSQSTTLKRHLRTHTGEKPFQCRICMRNFSRTEHLARHLKTHLRGSSAQ,
or
(SEQ ID NO: 277)
MSEVEFSHEYWMRHALTLAKRAWDEREVPVGAVLVHNNRVIGEGWNRPIGRH
DPTAHAEIMALRQGGLVMQNYRLIDATLYVTLEPCVMCAGAMIHSRIGRVVFGARDA
KTGAAGSLMDVLHHPGMNHRVEITEGILADECAALLSDFFRMRRQEIKAQKKAQSSTD
SGGSSGGSSGSETPGTSESATPESSGGSSGGSSEVEFSHEYWMRHALTLAKRARDEREVP
VGAVLVLNNRVIGEGWNRAIGLHDPTAHAEIMALRQGGLVMQNYRLIDATLYVTFEPC
VMCAGAMIHSRIGRVVFGVRNAKTGAAGSLMDVLHYPGMNHRVEITEGILADECAAL
LCYFFRMPRQVFNAQKKAQSSTDSGGSSGGSSGSETPGTSESATPESSGGSSGGSKRNYI
LGLAIGITSVGYGIIDYETRDVIDAGVRLFKEANVENNEGRRSKRGARRLKRRRRHRIQR
VKKLLFDYNLLTDHSELSGINPYEARVKGLSQKLSEEEFSAALLHLAKRRGVHNVNEVE
EDTGNELSTKEQISRNSKALEEKYVAELQLERLKKDGEVRGSINRFKTSDYVKEAKQLL
KVQKAYHQLDQSFIDTYIDLLETRRTYYEGPGEGSPFGWKDIKEWYEMLMGHCTYFPE
ELRSVKYAYNADLYNALNDLNNLVITRDENEKLEYYEKFQIIENVFKQKKKPTLKQIAK
EILVNEEDIKGYRVTSTGKPEFTNLKVYHDIKDITARKEIIENAELLDQIAKILTIYQSSEDI
QEELTNLNSELTQEEIEQISNLKGYTGTHNLSLKAINLILDELWHTNDNQIAIFNRLKLVP
KKVDLSQQKEIPTTLVDDFILSPVVKRSFIQSIKVINAIIKKYGLPNDIIIELAREKNSKDAQ
KMINEMQKRNRQTNERIEEIIRTTGKENAKYLIEKIKLHDMQEGKCLYSLEAIPLEDLLN
NPFNYEVDHIIPRSVSFDNSFNNKVLVKQEENSKKGNRTPFQYLSSSDSKISYETFKKHIL
NLAKGKGRISKTKKEYLLEERDINRFSVQKDFINRNLVDTRYATRGLMNLLRSYFRVNN
LDVKVKSINGGFTSFLRRKWKFKKERNKGYKHHAEDALIIANADFIFKEWKKLDKAKK
VMENQMFEEKQAESMPEIETEQEYKEIFITPHQIKHIKDFKDYKYSHRVDKKPNRKLIND
TLYSTRKDDKGNTLIVNNLNGLYDKDNDKLKKLINKSPEKLLMYHHDPQTYQKLKLIM
EQYGDEKNPLYKYYEETGNYLTKYSKKDNGPVIKKIKYYGNKLNAHLDITDDYPNSRN
KVVKLSLKPYRFDVYLDNGVYKFVTVKNLDVIKKENYYEVNSKCYEEAKKLKKISNQ
AEFIASFYKNDLIKINGELYRVIGVNNDLLNRIEVNMIDITYREYLENMNDKRPPHIIKTI
ASKTQSIKKYSTDILGNLYEVKSKKHPQIIKKGEGADKRTADGSEFESPKKKRKVSSGNS
NANSRGPSFSSGLVPLSLRGSHSRPGERPFQCRICMRNFSRGEHLRQHTRTHTGEKPFQC
RICMRNFSQSGTLKRHLRTHTGEKPFQCRICMRNFSRNDKLVPHLKTHLRGSSAQ.

[0749] 146. The base editor system of any one of the preceding embodiments, wherein the guide polynucleotide comprises two individual polynucleotides, wherein the two individual polynucleotides are two DNAs, two RNAs or a DNA and a RNA.
[0750] 147. The base editor system of any one of the embodiments 109-146, wherein the guide polynucleotides comprise a crRNA and a tracrRNA, wherein the crRNA comprises a nucleic acid sequence complementary to a target sequence in the SERPINA1 polynucleotide.
[0751] 148. The base editor system of embodiment 147, wherein the target sequence comprises a sequence selected from the group consisting of: GACAAGAAAGGGACUGAAGC (SEQ ID NO: 306), AUCGACAAGAAAGGGACUGA (SEQ ID NO: 307), and ACACACCGGUUGGUGGCCUC (SEQ ID NO: 308) or a complementary thereof
[0752] 149. The base editor system of embodiment 147 or 148, wherein the base editor system comprises a single guide RNA (sgRNA).
[0753] 150. The base editor system of embodiment 149, wherein the sgRNA comprises a sequence selected from the group consisting of ACTCTaGGCAGAGGTCTCAAAGG (SEQ ID NO: 9) and GCTCTaGGCCGAAGTGTCGCAGG (SEQ ID NO: 10).
[0754] 151. The base editor system of any one embodiments 109-150, wherein the base editor system comprises a vector comprising one or more of the guide polynucleotide, the polynucleotide programmable DNA binding domain, and the deaminase domain.
[0755] 152. The base editor system of embodiment 151, wherein the vector is an adenovirus vector, an AAV vector, a lentivirus vector, or a retrovirus vector.
[0756] 153. A method of treating a disease in a subject in need thereof, comprising administering to the subject a base editor system comprising
[0757] a guide polynucleotide or a nucleic acid encoding the guide polynucleotide;
[0758] a polynucleotide programmable DNA binding domain or a nucleic acid encoding the polynucleotide programmable DNA binding domain, and
[0759] an deaminase domain or a nucleic acid encoding the adenosine deaminase domain,
[0760] wherein the guide polynucleotide is capable of targeting the base editor system to effect deamination of a pathogenic single nucleotide polymorphism (SNP) in a target polynucleotide of a cell in the subject,
[0761] wherein the pathogenic SNP is causative of a pathogenic amino acid mutation in Table 3A or Table 3B, wherein the deamination of the pathogenic SNP results in a conversion of the pathogenic SNP to its wild-type allele, thereby treating the disease.
[0762] 154. A method of treating a disease in a subject in need thereof, comprising
[0763] (a) introducing into a cell a base editor system comprising
[0764] a guide polynucleotides or a nucleic acid encoding the guide polynucleotide;
[0765] a polynucleotide programmable DNA binding domain or a nucleic acid encoding the polynucleotide programmable DNA binding domain, and
[0766] an deaminase domain or a nucleic acid encoding the deaminase domain, and
[0767] (b) administering the cell to the subject,
[0768] wherein the guide polynucleotide is capable of targeting the base editor system to effect deamination of a pathogenic single nucleotide polymorphism (SNP) in a target polynucleotide of a cell in the subject,
[0769] wherein the pathogenic SNP is causative of a pathogenic amino acid mutation in Table 3A or Table 3B, wherein the deamination of the pathogenic SNP results in a conversion of the pathogenic SNP to its wild-type allele, thereby treating the disease.
[0770] 155. A method of correcting a SNP causative of a disease in a target polynucleotide, comprising contacting the target polynucleotide with a base editor system comprising
[0771] a guide polynucleotides;
[0772] a polynucleotide programmable DNA binding domain, and
[0773] an deaminase domain,
[0774] wherein the guide polynucleotide is capable of targeting the base editor system to effect deamination of a pathogenic single nucleotide polymorphism (SNP) in a target polynucleotide of a cell in the subject,
[0775] wherein the pathogenic SNP is causative of a pathogenic amino acid mutation in Table 3A or Table 3B, wherein the deamination of the pathogenic SNP results in a conversion of the pathogenic SNP to its wild-type allele, thereby correcting the pathogenic SNP in the target polynucleotide.
[0776] 156. A method of producing a modified cell for treatment of a disease, comprising introducing into a cell a base editor system comprising
[0777] a guide polynucleotides or a nucleic acid encoding the guide polynucleotide;
[0778] a polynucleotide programmable DNA binding domain or a nucleic acid encoding the polynucleotide programmable DNA binding domain, and
[0779] an deaminase domain or a nucleic acid encoding the deaminase domain,
[0780] wherein the guide polynucleotide is capable of targeting the base editor system to effect deamination of a pathogenic single nucleotide polymorphism (SNP) in a target polynucleotide of a cell in the subject,
[0781] wherein the pathogenic SNP is causative of a pathogenic amino acid mutation in Table 3A or Table 3B, wherein the deamination of the SNP results in a conversion of the pathogenic SNP to its wild-type allele, thereby correcting the pathogenic SNP in the target polynucleotide.
[0782] 157. The method of embodiment 156, wherein the introduction is in vivo or ex vivo.
[0783] 158. The method of embodiment 156 or 157, wherein the cell is obtained from a subject having the disease.
[0784] 159. The method of any one of embodiments 156-158, wherein the disease is selected from the group consisting of Stargardt disease, pseudoxanthoma elasticum, medium-chain acyl-CoA dehydrogenase deficiency, severe combined immunodeficiency, primary hypoxaluria, autosomal recessive hypercholesterolemia, metachromatic leukodystrophy, Marteauz-Lamy Syndrome (MSPVI), Citrullinemia Type I, Darier disease classic homocysteinuria, cystic fibrosis, choroideremia, Neuronal ceroid lipofuscinosis, autosomal dominant deafness carnitine palmitoyltransferase II deficiency, cystinosis, autosomal recessive deafness, agammaglobulinemia, congenital factor XI deficiency, congenital factor V deficiency, congenital factor VII deficiency, hemophilia A, hemophilia B, tyrosinemia type 1, autosomal dominant hypophosphatemic rickets von Gierke disease, Mediterranean G6PD deficiency Morquio Syndrome (MPSIVA classic galactosemia, Gaucher diesease, glutaryl-CoA dehydrogenase deficiency glycine encephalopathy, cone-rod dystrophy, Sly Syndrome (MPSVII), sickle cell disease, intermitent porphyria, Lesch-Nyhan syndrome, Hunter syndrome, Hurler syndrome (MSPII), retinitis pigmentosa Andersen-Tawil syndrome, Meesmann epithelial corneal dystrophy, Parkinson's disease, Sanfilippo syndrome B (MPSIIIB), CADASIL syndromeblue-cone monochromatismphenylketonuriaPendred syndrome variegate porphyria neuronal ceroid lipofuscinosis 1Creutzfeldt-Jakob disease (CJD), hereditary chronic pancreatitis, Leber congenital amaurosis 2, Blackfan-Diamond anemia, Sanfilippo syndrome A (MPSIIIA), Neimann-Pick disease type A ATTR amyloidosis, retinitis pigmentosa/Usher syndrome type 1C, and myotubular myopathy.
[0785] 160. The method of any one of embodiments 156-159, wherein the target polynucleotide comprises a gene in Table 3A or Table 3B.
[0786] 161. The method of any one of embodiments 156-160, wherein the pathogenic amino acid mutation comprises a pathogenic mutation in Table 3A or Table 3B.
[0787] 162. The method of any one of embodiments 156-161, wherein the polynucleotide programmable DNA binding domain is a Cas9 domain.
[0788] 163. The method of embodiment 162, wherein the Cas9 domain is a nuclease inactive Cas9 domain or a Cas9 nickase domain.
[0789] 164. The method of embodiment 162 or 163, wherein the Cas9 domain comprises a SpCas9 domain.
[0790] 165. The method of embodiment 164, wherein the SpCas9 domain comprises a D10A and/or a H840A amino acid substitution or corresponding amino acid substitutions thereof 166. The method of embodiment 164 or 165, wherein the SpCas9 domain has specificity for a NGN PAM.
[0791] 167. The method of any one of embodiments 164-166, wherein the Cas9 domain comprises amino acid substitutions D1135M, S1136Q, G1218K, E1219F, A1322R, D1332A, R1335E, and T1337R, or corresponding amino acid substitutions thereof 168. The method of embodiment 164 or 165, wherein the SpCas9 domain has specificity for a NG PAM, a NNG PAM, a GAA PAM, a GAT PAM, or a CAA PAM.
[0792] 169. The method of embodiment 168, wherein the SpCas9 domain comprises amino acid substitutions E480K, E543K, and E1219V or corresponding amino acid substitutions thereof
[0793] 170. The method of embodiment 162 or 163, wherein the Cas9 domain comprises a SaCas9.
[0794] 171. The method of embodiment 170, wherein the SaCas9 domain has specificity for a NNNRRT PAM.
[0795] 172. The method of embodiment 170 or 171, wherein the SaCas9 domain comprises an amino acid substitution N579A or a corresponding amino acid substitution thereof
[0796] 173. The method of any one of embodiments 170-172, wherein the SaCas9 domain comprises amino acid substitutions E782K, N968K, and R1015H, or corresponding amino acid substitutions thereof
[0797] 174. The method of embodiment 162 or 163, wherein the Cas9 domain comprises a St1Cas9 domain.
[0798] 175. The method of embodiment 174, wherein the St1Cas9 domain has specificity for a NNACCA PAM.
[0799] 176. The method of any one of embodiments 156-175, wherein the deaminase domain comprises a cytidine deaminase domain.
[0800] 177. The method of embodiment 176, wherein the cytidine deaminase domain comprises an APOBEC1 domain.
[0801] 178. The method of any one of embodiments 156-175, wherein the deaminase domain comprises an adenosine deaminase domain.
[0802] 179. The method of embodiment 178, wherein the adenosine deaminase domain comprises a TadA 7.10 domain.
[0803] 180. The method of any one of embodiments 156-179, wherein the base editor system further comprises a UGI domain.
[0804] 181. The method of any one of embodiments 156-180, wherein the base editor system further comprises a zinc finger domain.
[0805] 182. The method of any one of embodiments 156-181, wherein the base editor system further comprises one or more linkers.
[0806] 183. The method of embodiment 182, wherein two or more of the polynucleotide programmable DNA binding domain, the deaminase domain, the UGI domain and the zinc finger domain are connected via a linker,
[0807] 184. The method of embodiment 183, wherein the linker is a peptide linker, thereby forming a base editing fusion protein.
[0808] 185. The method of embodiment 184, wherein the base editing fusion protein comprises the amino acid sequence of BE4.
[0809] 186. The method of embodiment 184, wherein the base editing fusion protein comprises the amino acid sequence of

(SEQ ID NO: 281)
MSEVEFSHEYWMRHALTLAKRAWDEREVPVGAVLVHNNRVIGEGWNRPIG
RHDPTAHAEIMALRQGGLVMQNYRLIDATLYVTLEPCVMCAGAMIHSRIG
RVVFGARDAKTGAAGSLMDVLHHPGMNHRVEITEGILADECAALLSDFFR
MRRQEIKAQKKAQSSTDSGGSSGGSSGSETPGTSESATPESSGGSSGGSS
EVEFSHEYWMRHALTLAKRARDEREVPVGAVLVLNNRVIGEGWNRAIGLH
DPTAHAEIMALRQGGLVMQNYRLIDATLYVTFEPCVMCAGAMIHSRIGRV
VFGVRNAKTGAAGSLMDVLHYPGMNHRVEITEGILADECAALLCYFFRMP
RQVFNAQKKAQSSTDSGGSSGGSSGSETPGTSESATPESSGGSSGGSDKK
YSIGLAIGTNSVGWAVITDEYKVPSKKFKVLGNTDRHSIKKNLIGALLFD
SGETAEATRLKRTARRRYTRRKNRICYLQEIFSNEMAKVDDSFFHRLEES
FLVEEDKKHERHPIFGNIVDEVAYHEKYPTIYHLRKKLVDSTDKADLRLI
YLALAHMIKFRGHFLIEGDLNPDNSDVDKLFIQLVQTYNQLFEENPINAS
GVDAKAILSARLSKSRRLENLIAQLPGEKKNGLFGNLIALSLGLTPNFKS
NFDLAEDAKLQLSKDTYDDDLDNLLAQIGDQYADLFLAAKNLSDAILLSD
ILRVNTEITKAPLSASMIKRYDEHHQDLTLLKALVRQQLPEKYKEIFFDQ
SKNGYAGYIDGGASQEEFYKFIKPILEKMDGTEELLVKLNREDLLRKQRT
FDNGSIPHQIHLGELHAILRRQEDFYPFLKDNREKIEKILTFRIPYYVGP
LARGNSRFAWMTRKSEETITPWNFEEVVDKGASAQSFIERMTNFDKNLPN
EKVLPKHSLLYEYFTVYNELTKVKYVTEGMRKPAFLSGEQKKAIVDLLFK
TNRKVTVKQLKEDYFKKIECFDSVEISGVEDRFNASLGTYHDLLKIIKDK
DFLDNEENEDILEDIVLTLTLFEDREMIEERLKTYAHLFDDKVMKQLKRR
RYTGWGRLSRKLINGIRDKQSGKTILDFLKSDGFANRNFMQLIHDDSLTF
KEDIQKAQVSGQGDSLHEHIANLAGSPAIKKGILQTVKVVDELVKVMGRH
KPENIVIEMARENQTTQKGQKNSRERMKRIEEGIKELGSQILKEHPVENT
QLQNEKLYLYYLQNGRDMYVDQELDINRLSDYDVDHIVPQSFLKDDSIDN
KVLTRSDKNRGKSDNVPSEEVVKKMKNYWRQLLNAKLITQRKFDNLTKAE
RGGLSELDKAGFIKRQLVETRQITKHVAQILDSRMNTKYDENDKLIREVK
VITLKSKLVSDFRKDFQFYKVREINNYHHAHDAYLNAVVGTALIKKYPKL
ESEFVYGDYKVYDVRKMIAKSEQEIGKATAKYFFYSNIMNFFKTEITLAN
GEIRKRPLIETNGETGEIVWDKGRDFATVRKVLSMPQVNIVKKTEVQTGG
FSKESILPKRNSDKLIARKKDWDPKKYGGFmqPTVAYSVLVVAKVEKGKS
KKLKSVKELLGITIMERSSFEKNPIDFLEAKGYKEVKKDLIIKLPKYSLF
ELENGRKRMLASAkfLQKGNELALPSKYVNFLYLASHYEKLKGSPEDNEQ
KQLFVEQHKHYLDEIIEQISEFSKRVILADANLDKVLSAYNKHRDKPIRE
QAENIIHLFTLTNLGAPrAFKYFDTTIaRKeYrSTKEVLDATLIHQSITG
LYETRIDLSQLGGDEGADKRTADGSEFESPKKKRKV.

[0810] 187. The method of any one of embodiments 156-186, wherein the deamination results in less than 10% indel formation.
[0811] 188. A base editor system comprising
[0812] a guide polynucleotide or a nucleic acid encoding the guide polynucleotide;
[0813] a polynucleotide programmable DNA binding domain or a nucleic acid encoding the polynucleotide programmable DNA binding domain, and
[0814] a deaminase domain or a nucleic acid encoding the adenosine deaminase domain,
[0815] wherein the guide polynucleotide is capable of targeting the base editor system to effect deamination of a pathogenic single nucleotide polymorphism (SNP) in a target polynucleotide, wherein the pathogenic SNP is causative of a pathogenic amino acid mutation in Table 3A or Table 3B, wherein the deamination of the pathogenic SNP results in a conversion of the pathogenic SNP to its wild-type allele, wherein the target polynucleotide comprises a targeting sequence in Table 3A or Table 3B.

### EXAMPLES

[0816] The following examples are provided for illustrative purposes only and are not intended to limit the scope of the claims provided herein.

### Example 1. PAM Variant Validation in Base Editors

[0817] Novel CRISPR systems and PAM variants enable the base editors to make precise corrections at a target SNP. Several novel PAM variants have been evaluated and validated. Details of PAM evaluations and base editors are described, for example, in International PCT Application Nos. PCT/2017/045381 (WO2018/027078) and PCT/US2016/058344 (WO2017/070632), each of which is incorporated herein by reference in its entirety. Also see Komor, A. C., et al., “Programmable editing of a target base in genomic DNA without double-stranded DNA cleavage” Nature 533, 420-424 (2016); Gaudelli, N. M., et al., “Programmable base editing of A⋅T to G⋅C in genomic DNA without DNA cleavage” Nature 551, 464-471 (2017); and Komor, A. C., et al., “Improved base excision repair inhibition and bacteriophage Mu Gam protein yields C:G-to-T:A base editors with higher efficiency and product purity” Science Advances 3:eaao4774 (2017), the entire contents of each of which are hereby incorporated by reference.

### Example 2. Gene Editing to Correct Alpha-1 Antitrypsin Deficiency (A1AD)

[0818] Alpha-1 antitrypsin (A1A or A1AT) is a protease inhibitor encoded by the SERPINA1 gene on chromosome 14. This glycoprotein is synthesized mainly in the liver and is secreted into the blood, with serum concentrations of 1.5-3.0 g/L (20-52 μmon) in healthy adults (FIG. 1). A1AT diffuses into the lung interstitium and alveolar lining fluid, where it inactivates neutrophil elastase, thereby protecting the lung tissue from protease-mediated damage. Alpha-1 antitrypsin deficiency (A1AD) is inherited in an autosomal codominant fashion.

[0819] Over 100 genetic variants of the SERPINA1 gene have been described, but not all are associated with disease. The alphabetic designation of these variants is based on their speed of migration on gel electrophoresis. The most common variant is the M (medium mobility) allele, and the two most frequent deficiency alleles are PiS and PiZ (the latter having the slowest rate of migration). Several mutations have been described that produce no measurable serum protein; these are referred to as “null” alleles. The most common genotype is MM, which produces normal serum levels of alpha-1 antitrypsin. Most people with severe deficiency are homozygous for the Z allele (ZZ). The Z protein misfolds and polymerizes during its production in the endoplasmic reticulum of hepatocytes; these abnormal polymers are trapped in the liver, greatly reducing the serum levels of alpha-1 antitrypsin. The liver disease seen in patients with alpha-1 antitrypsin deficiency is caused by the accumulation of abnormal alpha-1 antitrypsin protein in hepatocytes and the consequent cellular responses, including autophagy, the endoplasmic reticulum stress response and apoptosis. FIG. 2 shows the most common genotypes (MM, MZ, SS, SZ and ZZ) and the respective serum levels of alpha-1 antitrypsin. Reduced circulating levels of alpha-1 antitrypsin lead to increased neutrophil elastase activity in the lungs; this imbalance of protease and antiprotease activities results in the lung disease associated with this condition (FIG. 1).

[0820] Alpha-1 antitrypsin deficiency (A1AD) is most common in caucasians, and it most frequently affects the lungs and liver. In the lungs, the most common manifestation is early-onset (patients in their 30s and 40s) panacinar emphysema most pronounced in the lung bases. However, diffuse or upper lobe emphysema can occur, as can bronchiectasis. The most frequently described symptoms include dyspnea, wheezing and cough. Pulmonary function testing of affected individuals shows findings consistent with COPD; however, bronchodilator responsiveness may be observed and may be misdiagnosed as asthma.

[0821] Liver disease caused by the ZZ genotype manifests in various ways. Affected infants can present in the newborn period with cholestatic jaundice, sometimes with acholic stools (pale or clay-coloured) and hepatomegaly. Conjugated bilirubin, transaminases and gamma-glutamyl transferase levels in blood are elevated. Liver disease in older children and adults can present with an incidental finding of elevated transaminases or with signs of established cirrhosis, including variceal hemorrhage or ascites. Alpha-1 antitrypsin deficiency also predisposes patients to hepatocellular carcinoma. Although the homozygous ZZ genotype is necessary for liver disease to develop, a heterozygous Z mutation can act as a genetic modifier for other diseases by conferring a greater risk of more severe liver disease, such as in hepatitis C infection and cystic fibrosis liver disease.

[0822] The two most common clinical variants of A1AD are the E264V (PiS) and E342K (PiZ) alleles. More than half of A1AD patients harbor at least one copy of the mutation E342K. Nuclease genome editing via homology directed repair (HDR) is inefficient, and the abundant indels will lower circulating levels and worsen lung symptoms. Gene therapy via AAV to liver worsens liver pathology due to additional misfolded protein. AAVs encoding both wild-type A1AT and siRNA that knocks down E342K A1AT show promise for addressing both pathologies.

[0823] FIG. 3A shows a precise correction base editing strategy for a mutation in the SERPINA1 gene. The “A” nucleobase at position 7 in the sequence (A7), “Target A,” can be edited to restore wild-type. FIG. 3B shows a characterization of A1AT protein secretion as a function of alternate alleles generated by a DNA editor (E342K, D341G, E342G). HEK293T were transfected with vectors encoding A1AT variants, and supernatants were assessed by ELISA for A1AT content. This assay characterized the diminished secretion of an E342K-containing A1AT relative to WT A1AT. The results indicated that the PAM option is AGCT, which is expected to result in editing of “A” at position 5 and/or position 7 (A5 and/or A7) of the SERPINA1 sequence. A1AT function was found to be restored when A7 editing resulted in wild-type protein; when A5 and A7 editing resulted in glutamic acid (E) at position 342 and D341G; and when A7 and A8 were converted to WT and E342G. The assessed phenotypes (activities/function) of the recombinant mutant A1AT included both secretion of protein from cells and inhibition of neutrophil elastase. The functional activity of the A1AT variants is shown in FIG. 3C (inhibition of elastase). Interestingly, the D341G mutation had significant elastase activity, which confirms a restorative outcome for the A5 and A7 editing. FIG. 4 shows a strategy for generating polypeptide variants (e.g., adenosine deaminase variants).

### Example 3. Base Editing in HEK298T Cells

[0824] Base editing efficiency of various SNPs in different genes was tested in HEK298T cells (Table 7). For plasmid transfections, HEK293T cells were transiently transfected with Mirus TransIT293, which is a high efficiency, low toxicity DNA transfection reagent optimized for HEK293 cells, in a 3 μl:1 μg ratio using 250 ng of gRNA plasmid and 750 ng of base editor plasmid. For mRNA transfections, HEK293T cells were electroporated with 3 μg of total RNA using the Neon System at 1150V using two 20 ms pulses. After four days for plasmid transfections and two days for RNA electroporation, genomic DNA was extracted from the cells with a simple lysis buffer containing 0.05% SDS, 25 μg/ml proteinase K, 10 mM Tris pH 8.0, followed by heat inactivation at 85° C. Genomic sites were PCR amplified and sequenced on a MiSeq. Results were analyzed as has been described for base frequencies at each position and for percent indels. For example, the details of indel calculations are described in International PCT Application Nos. PCT/2017/045381 (WO2018/027078) and PCT/US2016/058344 (WO2017/070632), each of which is incorporated herein by reference for its entirety. Also see, Komor, A. C., et al., “Programmable editing of a target base in genomic DNA without double-stranded DNA cleavage” Nature 533, 420-424 (2016); Gaudelli, N. M., et al., “Programmable base editing of A⋅T to G⋅C in genomic DNA without DNA cleavage” Nature 551, 464-471 (2017); and Komor, A. C., et al., “Improved base excision repair inhibition and bacteriophage Mu Gam protein yields C:G-to-T:A base editors with higher efficiency and product purity” Science Advances 3:eaao4774 (2017), the entire contents of which are hereby incorporated by reference.

TABLE 7
Liver target editing of SNP correction

| | | US | | | | | Percent |
|---|---|---|---|---|---|---|---|
| | | Patient | Base | SEQ ID | | | Precise |
| Disease | Target | Estimate | Editor | NO: | Protospacer | PAM | Correction |
| Mucopoly- | IDUA | 600 | ABE | 282 | GCTCTAGGCCGA | NG | 12.53 |
| saccharidosis 1 | W402* | | | | AGTGTCGC | G | |
| Homocystinuria | CBS | 900 | CBE | 283 | TCACTGGGGTGG | NG | 26.1 |
| | I278T | | | | ATCCCGAA | G | |
| Homocystinuria | CBS | unknown | ABE | 284 | GTGGGCATCCTC | NG | 1.11 |
| | T191M | | | | ACAATCTC | C | |
| Glycogen | G6PC | 500 | ABE | 285 | GGACCTAGGCGA | NG | 37.22 |
| Storage | Q347* | | | | GGCAGTAG | G | |
| Disorder 1a | | | | | | | |
| Glycogen | G6PC | 500 | ABE | 286 | GACCTAGGCGAG | NG | 43.89 |
| Storage | Q347* | | | | GCAGTAGG | A | |
| Disorder 1a | | | | | | | |
| Glycogen | G6PC | 900 | ABE | 287 | CAGTATGGACAC | NN | 1.41 |
| Storage | R83C | | | | TGTCCAAA | GR | |
| Disorder 1a | | | | | | RT | |
| Alpha-1 | SERPINA1 | 30000 | ABE | 288 | ATCGACAAGAAA | NG | 0.39 |
| Antitrypsin | E342K | | | | GGGACTGA | C | |
| Deficiency | | | | | | | |
| (A1AD) | | | | | | | |

### Example 4. Improved NGC-PAM ABE Generated by Mutation Shuffling

[0825] HEK293T cells that contained an integrated lentiviral cassette of the PiZ ORF expressing a A1AT variant containing E342K (HEK293T-E342K) were transfected with plasmids expressing variant ABEs using Lipo2000. Following transfection, base editing in A1AT was characterized. This approach identified a number of improved ABEs, including Var-3, which has the following amino acid sequence:

(SEQ ID NO: 289)
MSEVEFSHEYWMRHALTLAKRAWDEREVPVGAVLVHNNRVIGEGWNRPIG
RHDPTAHAEIMALRQGGLVMQNYRLIDATLYVTLEPCVMCAGAMIHSRIG
RVVFGARDAKTGAAGSLMDVLHHPGMNHRVEITEGILADECAALLSDFFR
MRRQEIKAQKKAQSSTDSGGSSGGSSGSETPGTSESATPESSGGSSGGSS
EVEFSHEYWMRHALTLAKRARDEREVPVGAVLVLNNRVIGEGWNRAIGLH
DPTAHAEIMALRQGGLVMQNYRLIDATLYVTFEPCVMCAGAMIHSRIGRV
VFGVRNAKTGAAGSLMDVLHYPGMNHRVEITEGILADECAALLCYFFRMP
RQVFNAQKKAQSSTDSGGSSGGSSGSETPGTSESATPESSGGSSGGSDKK
YSIGLAIGTNSVGWAVITDEYKVPSKKFKVLGNTDRHSIKKNLIGALLFD
SGETAEATRLKRTARRRYTRRKNRICYLQEIFSNEMAKVDDSFFHRLEES
FLVEEDKKHERHPIFGNIVDEVAYHEKYPTIYHLRKKLVDSTDKADLRLI
YLALAHMIKFRGHFLIEGDLNPDNSDVDKLFIQLVQTYNQLFEENPINAS
GVDAKAILSARLSKSRRLENLIAQLPGEKKNGLFGNLIALSLGLTPNFKS
NFDLAEDAKLQLSKDTYDDDLDNLLAQIGDQYADLFLAAKNLSDAILLSD
ILRVNTEITKAPLSASMIKRYDEHHQDLTLLKALVRQQLPEKYKEIFFDQ
SKNGYAGYIDGGASQEEFYKFIKPILEKMDGTEELLVKLNREDLLRKQRT
FDNGSIPHQIHLGELHAILRRQEDFYPFLKDNREKIEKILTFRIPYYVGP
LARGNSRFAWMTRKSEETITPWNFEEVVDKGASAQSFIERMTNFDKNLPN
EKVLPKHSLLYEYFTVYNELTKVKYVTEGMRKPAFLSGEQKKAIVDLLFK
TNRKVTVKQLKEDYFKKIECFDSVEISGVEDRFNASLGTYHDLLKIIKDK
DFLDNEENEDILEDIVLTLTLFEDREMIEERLKTYAHLFDDKVMKQLKRR
RYTGWGRLSRKLINGIRDKQSGKTILDFLKSDGFANRNFMQLIHDDSLTF
KEDIQKAQVSGQGDSLHEHIANLAGSPAIKKGILQTVKVVDELVKVMGRH
KPENIVIEMARENQTTQKGQKNSRERMKRIEEGIKELGSQILKEHPVENT
QLQNEKLYLYYLQNGRDMYVDQELDINRLSDYDVDHIVPQSFLKDDSIDN
KVLTRSDKNRGKSDNVPSEEVVKKMKNYWRQLLNAKLITQRKFDNLTKAE
RGGLSELDKAGFIKRQLVETRQITKHVAQILDSRMNTKYDENDKLIREVK
VITLKSKLVSDFRKDFQFYKVREINNYHHAHDAYLNAVVGTALIKKYPKL
ESEFVYGDYKVYDVRKMIAKSEQEIGKATAKYFFYSNIMNFFKTEITLAN
GEIRKRPLIETNGETGEIVWDKGRDFATVRKVLSMPQVNIVKKTEVQTGG
FSKESILPKRNSDKLIARKKDWDPKKYGGFmqPTVAYSVLVVAKVEKGKS
KKLKSVKELLGITIMERSSFEKNPIDFLEAKGYKEVKKDLIIKLPKYSLF
ELENGRKRMLASAkfLQKGNELALPSKYVNFLYLASHYEKLKGSPEDNEQ
KQLFVEQHKHYLDEIIEQISEFSKRVILADANLDKVLSAYNKHRDKPIRE
QAENIIHLFTLTNLGAPrAFKYFDTTIaRKeYrSTKEVLDATLIHQSITG
LYETRIDLSQLGGDEGADKRTADGSEFESPKKKRKV

[0826] HEK293T-E342K were transfected by Neon electroporation using 2.5 μg Var-3 ABE mRNA and 1000 ng gRNA 191 length 20 nt.

[0827] The gRNA backbone provided as sgRNA for spCas9 base editors is as follows:

(SEQ ID NO: 2)
5′- GUUUUAGAGCUAGAAAUAGCAAGUUAAAAUAAGGCUAGUCCGUUAU
CAACUUGAAAAAGUGGCACCGAGUCGGUGCUUUU-3′

[0828] The gRNAs useful in the methods of the invention include the following:

(SEQ ID NO: 3)
5′-ACCAUCGACAAGAAAGGGACUGAGUUUUAGAGCUAGAAAUAGCAAGU
UAAAAUAAGGCUAGUCCGUUAUCAACUUGAAAAAGUGGCACCGAGUCGGU
GCUUUU-3′;
(SEQ ID NO: 4)
5′-CCAUCGACAAGAAAGGGACUGAGUUUUAGAGCUAGAAAUAGCAAGUU
AAAAUAAGGCUAGUCCGUUAUCAACUUGAAAAAGUGGCACCGAGUCGGUG
CUUUU-3′;
(SEQ ID NO: 5)
5′-CAUCGACAAGAAAGGGACUGAGUUUUAGAGCUAGAAAUAGCAAGUUA
AAAUAAGGCUAGUCCGUUAUCAACUUGAAAAAGUGGCACCGAGUCGGUGC
UUUU-3′;
(SEQ ID NO: 6)
5′-AUCGACAAGAAAGGGACUGAGUUUUAGAGCUAGAAAUAGCAAGUUAA
AAUAAGGCUAGUCCGUUAUCAACUUGAAAAAGUGGCACCGAGUCGGUGCU
UUU-3′;
(SEQ ID NO: 7)
5′-UCGACAAGAAAGGGACUGAGUUUUAGAGCUAGAAAUAGCAAGUUAAA
AUAAGGCUAGUCCGUUAUCAACUUGAAAAAGUGGCACCGAGUCGGUGCUU
UU-3′;
and
(SEQ ID NO: 8)
5′-CGACAAGAAAGGGACUGAGUUUUAGAGCUAGAAAUAGCAAGUUAAAA
UAAGGCUAGUCCGUUAUCAACUUGAAAAAGUGGCACCGAGUCGGUGCUUU
U-3′.

[0829] Editing with mRNA and sgRNA was primarily unlinked at A5 and A7. The Var-3 ABE vastly outperformed other variant ABEs and resulted in a total beneficial correction of more than 35% (A7 only=WT)+(A5+A7=WT+D341G—no change in secretion).

### Example 5. Optimizing gRNA Length for Correction of E342K in HEK293T Cells

[0830] Synthego gRNAs and mRNA for ABE Var-3 were transfected into HEK293T-E342K using the Neon System in duplicate. gRNAs having target complementary lengths of 18 and 19 nucleotides yielded a better ratio of editing at the desired A7 position compared with the A5 position (FIG. 5). This pattern is consistent with a mechanism by which truncated gRNAs shorten the accessible region of the R-loop and thus lower editing of positions close to the end of the gRNA.

[0831] The 18 and 19 nucleotide gRNAs and ABE Var-3 are tested for their ability to correct E342K mutations in induced pluripotent stem cell-derived E342 hepatocytes and in a PiZZ mouse model. SpCas9 mutants having altered PAM binding specificities were generated using NGC PAM evolution (FIGS. 6A, 6B). These SpCas9 mutants were selected to enrich for mutations within the PAM-interacting (PI) domain of Cas9. The library is screened for SpCas9s having altered PAM specificities.

### Example 6. Gene Editing to Correct Glycogen Storage Disorder Type 1a (Von Gierke Disease)

[0832] Glycogen Storage Disorder Type 1 (also known as GSD1 or Von Gierke Disease) is an inherited disorder that results in a deficiency in glycogenolysis and gluconeogenesis, with accumulation of glycogen in tissues, causing severe hypoglycemia and lactic acidosis with potential CNS damage. About one in 100,000 newborns in the United States are born with GSD1.

[0833] There are two types of GSD1, Type 1a (GSD1a) and Type 1b (GSD1b), which are caused by different genetic mutations. GSD1a is caused by a mutation in glucose-6-phosphatase (G6PC) and affects about 80% of patients with GSD1. About 25% of Caucasian patients carry the recessive mutation Q347*. Current treatment regimen involves regular or continuous cornstarch feeding between meals (amylase converts starch directly to glucose).

### Base Editing Strategy for the Correction of the Q347X Mutation

[0834] There is a direct correction of Q347* to restore expression of G6PC and normalize glucose metabolism. Base editors may be used for the correction of Q347X by efficiently converting A>G at a targeted site. A representative target site (highlighted) is shown in FIG. 7. A precise correction at this site would yield the following conversion: TAG>CAG (stop codon>Glutamine). The base editor may utilize either the NGG PAM recognition sequence or the NGA PAM recognition sequence. The tissue and delivery strategy may include liver lipid nanoparticle (LNP) delivery.

In Vitro Transfection of iPSc-Derived Hepatocytes Harboring the Q347X Mutation

[0835] Base editing was tested using an in vitro transfection method in iPSc-derived hepatocytes (Definigen, Lot 00419 F 002). The GSD1a iPSc-derived hepatocytes are compound heterozygous (Q347X/G222R) and harbor the Q347X mutation. GSD1a cells were plated and allowed to mature.

[0836] As shown in FIGS. 8A and 8B, a transfection schedule was selected based on the known maturation cycle for GSD1a iPSc-derived hepatocytes. FIG. 8A provides a timeline of the transfection schedule showing representative time points for plating, transfection, and cell harvest. FIG. 8B shows representative images of maturing GSD1a iPSc-derived hepatocytes on Day 5 and Day 7. After maturation (e.g. Day 12), the GSD1a cells were transfected with the base editor ABE7.10 VRQR/gRNA 272. 48-72 hrs post transfection (e.g. Day 14), the GSD1a transfected cells were harvested for gDNA.

[0837] Representative base editing precise correction data of G6PC Q347X for GSD1a is shown in FIGS. 9A and 9B. In FIG. 9A, base editing efficiency of G6PC Q347X in HEK293T cells for ABE-On target, ABE-Bystander, Indels, and Nuclease-Indels was examined using either NGA PAM or NGG PAM sequences. The targeted/insert sequence for G6PC using NGG PAM is shown below:
[0838] gga cct agg cga ggc agt ag ggg

[0839] The above target/insert sequence contains two “a” nucleobases corresponding to bystander (shown in italic and underlining) and on target (shown in bold and underlining).

[0840] The targeted/insert sequence for G6PC using NGA PAM is shown below:

ga cct agg cga ggc agt ag gga

[0841] The above target/insert sequence contains two “a” nucleobases corresponding to bystander (shown in italic and underlining) and on target (shown in bold and underlining).

[0842] The NGA PAM gRNA 272 yielded >40% precise correction of Q347X in HEK293T cells with low indels and no detectable bystander V384A (FIG. 9A). Thus, high base editing efficiency was achieved using HEK293 cells.

[0843] In FIG. 9B, the base editing efficiency in G6PC Q347X in patient iPSc-derived hepatocytes for ABE-On target, ABE-Bystander, Indels, and Nuclease-Indels was examined using either NGA PAM or NGG PAM sequences. Similar editing of G6PC Q347X in patient iPSc-derived hepatocytes was observed with both NGA (n=4) and NGG (n=2), with negligible Indels, bystander V384A. As shown in FIG. 9B, the precise correction in heterozygous patient iPS-derived Q347X hepatocytes resulted in about 8%-15% A>G conversion efficiency. While lower than the HEK293 cells, the base editing in Q347X iPSc hepaotcytes yielded cleaner results as compared to bystander.

A-to-G Conversion Efficiency for ABE Variants in Patient iPSc-Derived Hepatocytes

[0844] The A-to-G conversion efficiency was tested for ABE variants in G6PC Q347X patient iPSc-derived hepatocytes. mRNA variants were generated (TriLink pBxt464, MSP464, MSP465, MSP471) and transfected into GSD1a patient iPSc-derived hepatocytes on Day 12 of culture. On Day 14, the cells were harvested for gDNA isolation and PAS staining was conducted.

[0845] The targeted/insert sequence for G6PC using GGA PAM is shown below:

(SEQ ID NO: 290)
Gacctaggcgaggcagtagg

[0846] The above target/insert sequence contains two “a” nucleobases corresponding to bystander (shown in italic and underlining) and on target (shown in bold and underlining).

[0847] The percent of base editing correction efficiency of Q347X was similar among the mRNA variants with about 10% A-to-G conversion efficiency for the heterozygous sequence (FIG. 10).

### Example 7. Gene Editing to Correct Mucopolysaccharidosis Type 1 (Hurler Syndrome)

[0848] Mucopolysaccharidosis type 1 (also known as MPS1 or Hurler Syndrome) is a rare autosomal recessive lysosomal storage disorder that occurs in about one in 200,000 births. MPS1 is characterized by skeletal abnormalities, cognitive impairment, heart disease, respiratory problems, enlarged liver and spleen, and reduced life expectancy. MPS1 is caused by mutations in alpha-L-iduronidase gene (IDUA), leading to deficiency of alpha-L-iduronidase, which is essential for the breakdown of glycosaminoglycans in lysosomes.

[0849] The amino acid sequence of a representative mouse alpha-L-iduronidase (IDUA) protein, found under NCBI Reference Sequence No. NP_032351.2, is provided below:

(SEQ ID NO: 291)

| | |
|---|---|
| 1 | MRPPRPSSAM LTFFAAFLAA PLALAESPYL VRVDAARPLR |
| | PLLPFWRSTG FCPPLPHDQA |
| 61 | DQYDLSWDQQ LNLAYIGAVP HSGIEQVRIH WLLDLITARK |
| | SPGQGLMYNF THLDAFLDLL |
| 121 | MENQLLPGFE LMGSPSGYFT DFDDKQQVFE WKDLVSLLAR |
| | RYIGRYGLTH VSKWNFETWN |
| 181 | EPDHHDFDNV SMTTQGFLNY YDACSEGLRI ASPTLKLGGP |
| | GDSFHPLPRS PMCWSLLGHC |
| 241 | ANGTNFFTGE VGVRLDYISL HKKGAGSSIA ILEQEMAVVE |
| | QVQQLFPEFK DTPIYNDEAD |
| 301 | PLVGWSLPQP WRADVTYAAL VVKVIAQHQN LLFANSSSSM |
| | RYVLLSNDNA FLSYHPYPFS |
| 361 | QRTLTARFQV NNTHPPHVQL LRKPVLTVMG LMALLDGEQL |
| | WAEVSKAGAV LDSNHTVGVL |
| 421 | ASTHHPEGSA AAWSTTVLIY TSDDTHAHPN HSIPVTLRLR |
| | GVPPGLDLVY IVLYLDNQLS |
| 481 | SPYSAWQHMG QPVFPSAEQF RRMRMVEDPV AEAPRPFPAR |
| | GRLTLHRKLP VPSLLLVHVC |
| 541 | TRPLKPPGQV SRLRALPLTH GQLILVWSDE RVGSKCLWTY |
| | EIQFSQKGEE YAPINRRPST |
| 601 | FNLFVFSPDT AVVSGSYRVR ALDYWARPGP FSDPVTYLDV |
| | PAS |

[0850] A representative mouse alpha-L-iduronidase (IDUA) nucleic acid sequence, found under NCBI Reference Sequence No. NM_008325.4 is provided below:

| (SEQ ID NO: 292) | |
|---|---|
| 1 | ctctgtgccc acccactgcc aagagggaca ggtctcaaag gtcagggcag tgtcccggga |
| 61 | aggagggcat cggctcctgg gagcggcctt aggacgcggg gtggactctc accatcgcac |
| 121 | aggaagccag ccagtcccca gatgaagtcc gagcagaggt ggcagaagag cacctacagg |
| 181 | cctccagcga gaccgagaca gccgcaagaa taatggccgc tctgagacac ccaagcactg |
| 241 | ctaatgttgg ttccattttt ggagcgcctg ggacgcagcg gaactcgcca gcacggggcg |
| 301 | gcgcgtgact gggttccttt ttgtcccggc ctggcgagag gtcacgtggg gcgttacgca |
| 361 | gaggcggaac actgcgaccg ccgcctaaaa agcttgctgt ttaggggcac ctggatatcc |
| 421 | caaccatgcg acccccgcgt ccctcctcag ctatgctgac gttttttgct gcgttcttgg |
| 481 | ccgcgccctt ggcgctggct gagtcaccgt acctggtgcg tgtggacgca gcccgcccgc |
| 541 | tgaggcctct gttgcccttc tggaggagca ccggcttctg ccccccactg cctcacgacc |
| 601 | aggctgacca gtacgacctt agttgggacc agcaactgaa ccttgcctac ataggtgccg |
| 661 | tacctcacag tggcattgag caggtccgga tacactggct gctggatctc atcacagcca |
| 721 | ggaagtcacc tgggcaggga cttatgtaca acttcaccca cttggatgca ttcttggacc |
| 781 | ttctcatgga gaaccagctt ctccctggat ttgagctcat gggcagtcct tctgggtact |
| 841 | tcacggactt tgatgacaag cagcaggtgt ttgaatggaa ggacctggtt tctctcttgg |
| 901 | ccaggagata cattggtagg tatgggctga cacacgtttc caagtggaac tttgagactt |
| 961 | ggaatgaacc agaccaccat gactttgaca acgtgtccat gaccacacaa ggcttcctga |
| 1021 | attactatga tgcctgctct gaggggctgc gcattgccag ccccactttg aagttgggtg |
| 1081 | gtcctgggga ttccttccac cccctgccaa ggtcaccaat gtgctggagc ctcctgggtc |
| 1141 | actgtgccaa tggaaccaac ttcttcactg gcgaggtggg cgtgcgtctg gattacatct |
| 1201 | ccctgcacaa gaagggtgca ggtagctcca tcgccatcct ggagcaggag atggcagttg |
| 1261 | tggagcaggt ccagcagctc ttccctgagt tcaaggatac ccctatttac aatgacgagg |
| 1321 | cagaccctct ggtgggctgg tccctgccac aaccttggag agctgatgtg acttatgcgg |
| 1381 | ccctggtggt gaaggtcatt gcacagcacc agaacctgct gtttgccaac agcagttcct |
| 1441 | ccatgcgcta tgtgctcctc agcaatgaca atgccttcct gagctaccac ccgtaccctt |
| 1501 | tctcccagcg cacacttact gctcgattcc aggtcaacaa tactcaccca ccccacgtgc |
| 1561 | agttgctgcg aaagccagta ctcacagtca tggggctcat ggccctgttg gatggagaac |
| 1621 | aactctgggc agaggtctca aaggctgggg ctgtgttgga cagcaatcat acagtgggtg |
| 1681 | tcctggccag cacccatcac cctgaaggct ccgcagcggc ctggagtacc acagtcctca |
| 1741 | tctacactag tgatgacacc cacgcacacc ccaaccacag tatccctgtg actcttcgcc |
| 1801 | tgcgtggggt acctcctggc ttggatcttg tctacatagt actctactta gacaatcaac |
| 1861 | tcagcagccc ctacagtgcg tggcagcaca tgggccagcc agtcttcccc tctgcagagc |
| 1921 | agttccgacg tatgcgcatg gtggaggacc ccgtggctga ggcaccacgc ccctttcctg |
| 1981 | ctaggggccg cctgacccta caccggaagc ttccggtgcc atcactcctg ctggtgcatg |
| 2041 | tatgcacacg ccccttgaag ccacctgggc aggtcagccg gctccgtgca ctgcccctga |
| 2101 | cacatggaca gctgattttg gtctggtcag atgagcgtgt gggctccaag tgcctgtgga |
| 2161 | catatgagat ccagttttcc cagaaaggtg aagagtatgc cccaatcaac aggaggccgt |
| 2221 | ctacttttaa cctctttgtg ttcagcccag acacagctgt ggtctctggc tcctaccgag |
| 2281 | ttcgagcatt ggattactgg gcccggccag gccccttctc cgaccctgtg acttacctgg |
| 2341 | atgtccctgc ctcatgagag ccactggctc ctagtgactt gtgaatctgt gctgactggt |
| 2401 | gaatggagtc aaccagtatg agctagactg ccattagcta ggcagctgac tgtcagcttc |
| 2461 | tattgttctt cccctatttc cctttaaagt gtctttctct acctcagact tagggtcagt |
| 2521 | ctttgtggct aagcacttta taggcccagt tggagtgacc tttgcccacc ttcctcccca |
| 2581 | tgcccagctg ttcaaaaagt ttaaatgtgg gactggaaag atggctcagt agataaagtg |
| 2641 | cttgctgtgc aggcccaggg acttgtgttc agatatctag cactcatgta taggctgggc |
| 2701 | atggcaatat atgcctattg tcctagtgtt ggtggaaggg acagagacag gccagggttc |
| 2761 | cctggccttc cagtctacct gaaactgcaa gctccaggtt cagtaagaaa ccctgtttta |
| 2821 | gaaaaatcaa gtagagtgct tggtacacac acacacacac acacacagag |
| 2881 | tctaaattta gtttcttgag cttctgtaat atcaaaaatg aagttatgta cttctgaaat |
| 2941 | acaatactgc acagagtaag catcttcatt ccaacaggaa aaagaaatga cagggaagga |
| 3001 | tttaagtgaa acaagaccaa agcatagcaa gacaaacgtt aaatcctgca gctccattct |
| 3061 | cagcatcggg gcccatgatc ctgtgatgtg ctggacagtc tgtgtctgtg gtgttgccat |
| 3121 | ttccagccgc catgaccttt ctcctaggct ggtgtcttgg gcttcctatt gattcgataa |
| 3181 | accgcgatga atgagcagaa gcatctgggt agggaagcgt tgacttcact tgtattccta |
| 3241 | cattacagtc tatcatcgaa ggcagtcagg caggcacctg gaggcaggaa gtcatggaga |
| 3301 | ggccatggag gggtgctgct tactcagact atgatcttac acatcccggg atcaccagcc |
| 3361 | aaagggtggg cccccaccca caacggtctg gaccctccca catcaatcac tagtttaaga |
| 3421 | aaacaggctt atctataggt caatcttgtt ggggcatttt tctcaattga ggttccttct |
| 3481 | tcccaaatga ctctagcttg taataaactg aaataaagcc accccaatct tgccacacat |
| 3541 | tacctggcct cccaagtctt cctttgaaat ctgggtggaa gccaacataa ccctgtcact |
| 3601 | gtaactctga tattctacct tctaagccag catcctgtgg atcacagcct actatcagct |
| 3661 | tgagtggtag ttgaggactc ctgggtcatc catggctaca ataagcatga agtgcctgag |
| 3721 | gcttagtccc atgcatttgt ggagaatatt atgatgatga tatctagtag aggggggagg |
| 3781 | ctgttcacct caaagggaac aggaagtaga gtggggatag aattaagcta aatacttctt |
| 3841 | cactgacccg ctttgtttaa ctcagccctg catcctaaag tttctagaat ctccccaaac |
| 3901 | agacctatta cctggaaact acctttaagg tgtaagcctg ggctgatctt aataggctga |
| 3961 | tgttcctacc ttggttctgg ccacgggaag aaccctctct cctttagtac aaacccctgg |
| 4021 | tgtgccccac cagagagcct gttggacaca cgtgtcctta attcattctg cacatttttc |
| 4081 | ttctctccat cagcacacag aagttcagca tacagaggtt tgtgctgaaa tgtaggcgta |
| 4141 | ctcccaagct ctccccagag tactatcacc tactgtccag gaaatgagtc tgagtgcagt |
| 4201 | gctcatatac actgcatggc tacatccaaa gtcagagttc ctctgccctc atgcctcttg |
| 4261 | aagtgaacga aatgtgatga ccttctgcag ggtgtttttt agtcctctgt ggaccctagg |
| 4321 | ctggccttgg catcttggct cacctgtccc agagttacta ctattaagat tacaggtgtg |
| 4381 | taccaccatg cctgccaatt acctctcact ttaaataaaa tatgacattt |

[0851] The amino acid sequence of a representative human alpha-L-iduronidase (IDUA) protein, found under NCBI Reference Sequence No. NP_000194.2, is provided below:

(SEQ ID NO: 293)

| | |
|---|---|
| 1 | MRPLRPRAAL LALLASLLAA PPVAPAEAPH LVHVDAARAL |
| | WPLRRFWRST GFCPPLPHSQ |
| 61 | ADQYVLSWDQ QLNLAYVGAV PHRGIKQVRT HWLLELVTTR |
| | GSTGRGLSYN FTHLDGYLDL |
| 121 | LRENQLLPGF ELMGSASGHF TDFEDKQQVF EWKDLVSSLA |
| | RRYIGRYGLA HVSKWNFETW |
| 181 | NEPDHHDFDN VSMTMQGFLN YYDACSEGLR AASPALRLGG |
| | PGDSFHTPPR SPLSWGLLRH |
| 241 | CHDGTNFFTG EAGVRLDYIS LHRKGARSSI SILEQEKVVA |
| | QQIRQLFPKF ADTPIYNDEA |
| 301 | DPLVGWSLPQ PWRADVTYAA MVVKVIAQHQ NLLLANTTSA |
| | FPYALLSNDN AFLSYHPHPF |
| 361 | AQRTLTARFQ VNNTRPPHVQ LLRKPVLTAM GLLALLDEEQ |
| | LWAEVSQAGT VLDSNHTVGV |
| 421 | LASAHRPQGP ADAWRAAVLI YASDDTRAHP NRSVAVTLRL |
| | RGVPPGPGLV YVTRYLDNGL |
| 481 | CSPDGEWRRL GRPVFPTAEQ FRRMRAAEDP VAAAPRPLPA |
| | GGRLTLRPAL RLPSLLLVHV |
| 541 | CARPEKPPGQ VTRLRALPLT QGQLVLVWSD EHVGSKCLWT |
| | YEIQFSQDGK AYTPVSRKPS |
| 601 | TFNLFVFSPD TGAVSGSYRV RALDYWARPG PFSDPVPYLE |
| | VPVPRGPPSP GNP |

[0852] A representative human alpha-L-iduronidase (IDUA) nucleic acid sequence, found under NCBI Reference Sequence No. NM_000203, is provided below:

(SEQ ID NO: 305)

| | |
|---|---|
| 1 | agtgcagccc gaagccccgc agtccccgag cacgcgtggc |
| | catgcgtccc ctgcgccccc |
| 61 | gcgccgcgct gctggcgctc ctggcctcgc tcctggccgc |
| | gcccccggtg gccccggccg |
| 121 | aggccccgca cctggtgcat gtggacgcgg cccgcgcgct |
| | gtggcccctg cggcgcttct |
| 181 | ggaggagcac aggcttctgc cccccgctgc cacacagcca |
| | ggctgaccag tacgtcctca |
| 241 | gctgggacca gcagctcaac ctcgcctatg tgggcgccgt |
| | ccctcaccgc ggcatcaagc |
| 301 | aggtccggac ccactggctg ctggagcttg tcaccaccag |
| | ggggtccact ggacggggcc |
| 361 | tgagctacaa cttcacccac ctggacgggt acctggacct |
| | tctcagggag aaccagctcc |
| 421 | tcccagggtt tgagctgatg ggcagcgcct cgggccactt |
| | cactgacttt gaggacaagc |
| 481 | agcaggtgtt tgagtggaag gacttggtct ccagcctggc |
| | caggagatac atcggtaggt |
| 541 | acggactggc gcatgtttcc aagtggaact tcgagacgtg |
| | gaatgagcca gaccaccacg |
| 601 | actttgacaa cgtctccatg accatgcaag gcttcctgaa |
| | ctactacgat gcctgctcgg |
| 661 | agggtctgcg cgccgccagc cccgccctgc ggctgggagg |
| | ccccggcgac tccttccaca |
| 721 | ccccaccgcg atccccgctg agctggggcc tcctgcgcca |
| | ctgccacgac ggtaccaact |
| 781 | tcttcactgg ggaggcgggc gtgcggctgg actacatctc |
| | cctccacagg aagggtgcgc |
| 841 | gcagctccat ctccatcctg gagcaggaga aggtcgtcgc |
| | gcagcagatc cggcagctct |
| 901 | tccccaagtt cgcggacacc cccatttaca acgacgaggc |
| | ggacccgctg gtgggctggt |
| 961 | ccctgccaca gccgtggagg gcggacgtga cctacgcggc |
| | catggtggtg aaggtcatcg |
| 1021 | cgcagcatca gaacctgcta ctggccaaca ccacctccgc |
| | cttcccctac gcgctcctga |
| 1081 | gcaacgacaa tgccttcctg agctaccacc cgcacccctt |
| | cgcgcagcgc acgctcaccg |
| 1141 | cgcgcttcca ggtcaacaac acccgcccgc cgcacgtgca |
| | gctgttgcgc aagccggtgc |
| 1201 | tcacggccat ggggctgctg gcgctgctgg atgaggagca |
| | gctctgggcc gaagtgtcgc |
| 1261 | aggccgggac cgtcctggac agcaaccaca cggtgggcgt |
| | cctggccagc gcccaccgcc |
| 1321 | cccagggccc ggccgacgcc tggcgcgccg cggtgctgat |
| | ctacgcgagc gacgacaccc |
| 1381 | gcgcccaccc caaccgcagc gtcgcggtga ccctgcggct |
| | gcgcggggtg ccccccggcc |
| 1441 | cgggcctggt ctacgtcacg cgctacctgg acaacgggct |
| | ctgcagcccc gacggcgagt |
| 1501 | ggcggcgcct gggccggccc gtcttcccca cggcagagca |
| | gttccggcgc atgcgcgcgg |
| 1561 | ctgaggaccc ggtggccgcg gcgccccgcc ccttacccgc |
| | cggcggccgc ctgaccctgc |
| 1621 | gccccgcgct gcggctgccg tcgcttttgc tggtgcacgt |
| | gtgtgcgcgc cccgagaagc |
| 1681 | cgcccgggca ggtcacgcgg ctccgcgccc tgcccctgac |
| | ccaagggcag ctggttctgg |
| 1741 | tctggtcgga tgaacacgtg ggctccaagt gcctgtggac |
| | atacgagatc cagttctctc |
| 1801 | aggacggtaa ggcgtacacc ccggtcagca ggaagccatc |
| | gaccttcaac ctctttgtgt |
| 1861 | tcagcccaga cacaggtgct gtctctggct cctaccgagt |
| | tcgagccctg gactactggg |
| 1921 | cccgaccagg ccccttctcg gaccctgtgc cgtacctgga |
| | ggtccctgtg ccaagagggc |
| 1981 | ccccatcccc gggcaatcca tgagcctgtg ctgagcccca |
| | gtgggttgca cctccaccgg |
| 2041 | cagtcagcga gctggggctg cactgtgccc atgctgccct |
| | cccatcaccc cctttgcaat |
| 2101 | atatttttat attttattat tttcttttat atcttggtac |
| | caacgccccc tttaaagcgg |
| 2161 | ctttgcacag gtca |

[0853] Base editing was tested in the HEK293T cell line with mouse and human IDUA target sequences (FIG. 11). The targeted/insert sequence for mouse IDUA is shown below and corresponds to nucleic acids 1612-1824 of the mouse IDUA gene sequence shown above.

(SEQ ID NO: 294)
atggagaaca actctaggca gaggtctcaa aggctggggc
tgtgttggac agcaatcata cagtgggtgt cctggccagc
acccatcacc ctgaaggctc cgcagcggcc tggagtacca
cagtcctcat ctacactagt gatgacaccc acgcacaccc
caaccacagt atccctgtga ctcttcgcct gcgtggggta
cctcctggct tgg

[0854] The above mouse target/insert sequence contains an “a” nucleobase (shown in bold and underlining), while the mouse IDUA gene sequence contains a “g” nucleobase at position 1627 of the IDUA sequence.

[0855] The targeted/insert sequence in the human IDUA polynucleotide sequence is shown below and corresponds to nucleic acids 1231-1324-of the human IDUA gene sequence shown above.

(SEQ ID NO: 295)
atgaggagca gctctaggcc gaagtgtcgc aggccgggac
cgtcctggac agcaaccaca cggtgggcgt cctggccagc
gcccaccgcc ccca

[0856] The above human target/insert sequence contains an “a” nucleobase (shown in bold and underlining), while the human IDUA gene sequence contains a “g” nucleobase at position 1246 of the IDUA sequence.

[0857] For plasmid transfections, HEK293T cells were transfected with 250 ng of gRNA plasmid and 750 ng of base editor plasmid at 30,000 cells per well of a 48-well plate. The base editor SpCas9-ABE7.10 was used having the NGG PAM sequence. The mouse gRNA sequence is shown below and contains an “a” nucleobase (shown in bold and underlining):

(SEQ ID NO: 10)
gctctaggccgaagtgtcgc agg

[0858] The human gRNA sequence is shown below and contains an “a” nucleobase (shown in bold and underlining):

(SEQ ID NO: 9)
actctaggcagaggtctcaa agg

### Example 8. Materials and Methods

[0859] The results provided in the Examples described herein were obtained using the following materials and methods.

### Cloning.

[0860] DNA sequences of target polynucleotides and gRNAs and primers used are described herein. For gRNAs, the following scaffold sequence is presented: GUUUUAGAGC UAGAAAUAGC AAGUUAAAAU AAGGCUAGUC CGUUAUCAAC UUGAAAAAGU GGCACCGAGU CGGUGCUUUU (SEQ ID NO: 2). This scaffold was used for the PAMs shown in the tables herein, e.g., NGG, NGA, NGC, NGT PAMs; the gRNA encompasses the scaffold sequence and the spacer sequence (target sequence) for disease-associated genes (e.g., Tables 3A and 3B) as provided herein or as determined based on the knowledge of the skilled practitioner and as would be understood to the skilled practitioner in the art. (See, e.g., Komor, A C., et al., “Programmable editing of a target base in genomic DNA without double-stranded DNA cleavage” Nature 533, 420-424 (2016); Gaudelli, N. M., et al., “Programmable base editing of A⋅T to G⋅C in genomic DNA without DNA cleavage” Nature 551, 464-471 (2017); Komor, A C., et al., “Improved base excision repair inhibition and bacteriophage Mu Gam protein yields C:G-to-T:A base editors with higher efficiency and product purity” Science Advances 3:eaao4774 (2017), and Rees, H. A., et al., “Base editing: precision chemistry on the genome and transcriptome of living cells.” Nat Rev Genet. 2018 December; 19(12):770-788. doi: 10.1038/s41576-018-0059-1).

[0861] PCR was performed using VeraSeq ULtra DNA polymerase (Enzymatics), or Q5 Hot Start High-Fidelity DNA Polymerase (New England Biolabs). Base Editor (BE) plasmids were constructed using USER cloning (New England Biolabs). Deaminase genes were synthesized as gBlocks Gene Fragments (Integrated DNA Technologies). Cas9 genes used are listed below. Cas9 genes were obtained from previously reported plasmids. Deaminase and fusion genes were cloned into pCMV (mammalian codon-optimized) or pET28b (E. coli codon-optimized) backbones. sgRNA expression plasmids were constructed using site-directed mutagenesis.

[0862] Briefly, the primers listed herein above were 5′ phosphorylated using T4 Polynucleotide Kinase (New England Biolabs) according to the manufacturer's instructions. Next, PCR was performed using Q5 Hot Start High-Fidelity Polymerase (New England Biolabs) with the phosphorylated primers and the plasmid encoding a gene of interest as a template according to the manufacturer's instructions. PCR products were incubated with DpnI (20 U, New England Biolabs) at 37° C. for 1 hour, purified on a QIAprep spin column (Qiagen), and ligated using QuickLigase (New England Biolabs) according to the manufacturer's instructions. DNA vector amplification was carried out using Mach1 competent cells (ThermoFisher Scientific).

In Vitro Deaminase Assay on ssDNA.

[0863] Sequences of all ssDNA substrates are provided below. All Cy3-labelled substrates were obtained from Integrated DNA Technologies (IDT). Deaminases were expressed in vitro using the TNT T7 Quick Coupled Transcription/Translation Kit (Promega) according to the manufacturer's instructions using 1 μg of plasmid. Following protein expression, 5 μl of lysate was combined with 35 μl of ssDNA (1.8 μM) and USER enzyme (1 unit) in CutSmart buffer (New England Biolabs) (50 mM potassium acetate, 29 mM Tris-acetate, 10 mM magnesium acetate, 100 μg ml-1 BSA, pH 7.9) and incubated at 37° C. for 2 h. Cleaved U-containing substrates were resolved from full-length unmodified substrates on a 10% TBE-urea gel (Bio-Rad).

Expression and Purification of His6-rAPOBEC1-Linker—dCas9 Fusions.

[0864] E. coli BL21 STAR (DE3)-competent cells (ThermoFisher Scientific) were transformed with plasmids (e.g. plasmids encoding pET28b-His6-rAPOBEC1-linker-dCas9). The resulting expression strains were grown overnight in Luria-Bertani (LB) broth containing 100 μg ml-1 of kanamycin at 37° C. The cells were diluted 1:100 into the same growth medium and grown at 37° C. to OD600=˜0.6. The culture was cooled to 4° C. over a period of 2 h, and isopropyl-β-d-1-thiogalactopyranoside (IPTG) was added at 0.5 mM to induce protein expression. After ˜16 h, the cells were collected by centrifugation at 4,000 g and were resuspended in lysis buffer (50 mM tris(hydroxymethyl)-aminomethane (Tris)-HCl (pH 7.5), 1 M NaCl, 20% glycerol, 10 mM tris(2-carboxyethyl)phosphine (TCEP, Soltec Ventures)). The cells were lysed by sonication (20 s pulse-on, 20 s pulse-off for 8 min total at 6 W output) and the lysate supernatant was isolated following centrifugation at 25,000 g for 15 minutes. The lysate was incubated with His-Pur nickel-nitriloacetic acid (nickel-NTA) resin (ThermoFisher Scientific) at 4° C. for 1 hour to capture the His-tagged fusion protein. The resin was transferred to a column and washed with 40 ml of lysis buffer. The His-tagged fusion protein was eluted in lysis buffer supplemented with 285 mM imidazole, and concentrated by ultrafiltration (Amicon-Millipore, 100-kDa molecular weight cut-off) to 1 ml total volume. The protein was diluted to 20 ml in low-salt purification buffer containing 50 mM tris(hydroxymethyl)-aminomethane (Tris)-HCl (pH 7.0), 0.1 M NaCl, 20% glycerol, 10 mM TCEP and loaded onto SP Sepharose Fast Flow resin (GE Life Sciences). The resin was washed with 40 ml of this low-salt buffer, and the protein eluted with 5 ml of activity buffer containing 50 mM tris(hydroxymethyl)-aminomethane (Tris)-HCl (pH 7.0), 0.5 M NaCl, 20% glycerol, 10 mM TCEP. The eluted proteins were quantified by SDS-PAGE. In vitro transcription of sgRNAs.

[0865] Linear DNA fragments containing the T7 promoter followed by the 20-bp sgRNA target sequence were transcribed in vitro using the TranscriptAid T7 High Yield Transcription Kit (ThermoFisher Scientific) according to the manufacturer's instructions. sgRNA products were purified using the MEGAclear Kit (ThermoFisher Scientific) according to the manufacturer's instructions and quantified by UV absorbance.

Preparation of Cy3-Conjugated dsDNA Substrates.

[0866] Typically, unlabeled sequence strands (e.g. sequences of 80-nt unlabelled strands) were ordered as PAGE-purified oligonucleotides from IDT. A 25-nt Cy3-labelled primer complementary to the 3′ end of each 80-nt substrate was ordered as an HPLC-purified oligonucleotide from IDT. To generate the Cy3-labelled dsDNA substrates, the 80-nt strands (5 μl of a 100 μM solution) were combined with the Cy3-labelled primer (5 μl of a 100 μM solution) in NEBuffer 2 (38.25 μl of a 50 mM NaCl, 10 mM Tris-HCl, 10 mM MgCl₂, 1 mM DTT, pH 7.9 solution, New England Biolabs) with dNTPs (0.75 μl of a 100 mM solution) and heated to 95° C. for 5 min, followed by a gradual cooling to 45° C. at a rate of 0.1° C. per s. After this annealing period, Klenow exo-(5 U, New England Biolabs) was added and the reaction was incubated at 37° C. for 1 h. The solution was diluted with buffer PB (250 μl, Qiagen) and isopropanol (50 μl) and purified on a QIAprep spin column (Qiagen), eluting with 50 μl of Tris buffer. Deaminase assay on dsDNA. The purified fusion protein (20 μl of 1.9 μM in activity buffer) was combined with 1 equivalent of appropriate sgRNA and incubated at ambient temperature for 5 min. The Cy3-labelled dsDNA substrate was added to final concentration of 125 nM and the resulting solution was incubated at 37° C. for 2 h. The dsDNA was separated from the fusion by the addition of buffer PB (100 μl, Qiagen) and isopropanol (25 μl) and purified on a EconoSpin micro spin column (Epoch Life Science), eluting with 20 μl of CutSmart buffer (New England Biolabs). USER enzyme (1 U, New England Biolabs) was added to the purified, edited dsDNA and incubated at 37° C. for 1 h. The Cy3-labeled strand was fully denatured from its complement by combining 5 μl of the reaction solution with 15 μl of a DMSO-based loading buffer (5 mM Tris, 0.5 mM EDTA, 12.5% glycerol, 0.02% bromophenol blue, 0.02% xylene cyan, 80% DMSO). The full-length C-containing substrate was separated from any cleaved, U-containing edited substrates on a 10% TBE-urea gel (Bio-Rad) and imaged on a GE Amersham Typhoon imager.

Preparation of In Vitro-Edited dsDNA for High-Throughput Sequencing.

[0867] Oligonucleotides were obtained from IDT. Complementary sequences were combined (5 μl of a 100 μM solution) in Tris buffer and annealed by heating to 95° C. for 5 min, followed by a gradual cooling to 45° C. at a rate of 0.1° C. per s to generate 60-bp dsDNA substrates. Purified fusion protein (20 μl of 1.9 μM in activity buffer) was combined with 1 equivalent of appropriate sgRNA and incubated at ambient temperature for 5 min. The 60-mer dsDNA substrate was added to final concentration of 125 nM, and the resulting solution was incubated at 37° C. for 2 h. The dsDNA was separated from the fusion by the addition of buffer PB (100 μl, Qiagen) and isopropanol (25 μl) and purified on a EconoSpin micro spin column (Epoch Life Science), eluting with 20 μl of Tris buffer. The resulting edited DNA (1 μl was used as a template) was amplified by PCR using high-throughput sequencing primer pairs and VeraSeq Ultra (Enzymatics) according to the manufacturer's instructions with 13 cycles of amplification. PCR reaction products were purified using RapidTips (Diffinity Genomics), and the purified DNA was amplified by PCR with primers containing sequencing adapters, purified, and sequenced on a MiSeq high-throughput DNA sequencer (Illumina) as previously described.

### Cell Culture.

[0868] HEK293T (ATCC CRL-3216) and U2OS (ATCC HTB-96) were maintained in Dulbecco's Modified Eagle's Medium plus GlutaMax (ThermoFisher) supplemented with 10% (v/v) fetal bovine serum (FBS), at 37° C. with 5% CO2. HCC1954 cells (ATCC CRL-2338) were maintained in RPMI-1640 medium (ThermoFisher Scientific) supplemented as described above. Immortalized cells containing the gene of interest (e.g. SERPINA1, G6PC, IDUA, etc.) (Taconic Biosciences) were cultured in Dulbecco's Modified Eagle's Medium plus GlutaMax (ThermoFisher Scientific) supplemented with 10% (v/v) fetal bovine serum (FBS) and 200 μg ml-1 Geneticin (ThermoFisher Scientific).

### Transfections.

[0869] HEK293T cells were seeded on 48-well collagen-coated BioCoat plates (Corning) and transfected at approximately 85% confluency. Briefly, 750 ng of BE and 250 ng of sgRNA expression plasmids were transfected using 1.5 μl of Lipofectamine 2000 (ThermoFisher Scientific) per well according to the manufacturer's protocol. HEK293T cells were transfected using appropriate Amaxa Nucleofector II programs according to manufacturer's instructions (V kits using program Q-001 for HEK293T cells).

### High-Throughput DNA Sequencing of Genomic DNA Samples.

[0870] Transfected cells were harvested after 3 days and the genomic DNA was isolated using the Agencourt DNAdvance Genomic DNA Isolation Kit (Beckman Coulter) according to the manufacturer's instructions. On-target and off-target genomic regions of interest were amplified by PCR with flanking high-throughput sequencing primer pair. PCR amplification was carried out with Phusion high-fidelity DNA polymerase (ThermoFisher) according to the manufacturer's instructions using 5 ng of genomic DNA as a template. Cycle numbers were determined separately for each primer pair as to ensure the reaction was stopped in the linear range of amplification. PCR products were purified using RapidTips (Diffinity Genomics). Purified DNA was amplified by PCR with primers containing sequencing adaptors. The products were gel purified and quantified using the Quant-iT PicoGreen dsDNA Assay Kit (ThermoFisher) and KAPA Library Quantification Kit-Illumina (KAPA Biosystems). Samples were sequenced on an Illumina MiSeq as previously described (Pattanayak, Nature Biotechnol. 31, 839-843 (2013)).

### Data Analysis.

[0871] Sequencing reads were automatically demultiplexed using MiSeq Reporter (Illumina), and individual FASTQ files were analysed with a custom Matlab. Each read was pairwise aligned to the appropriate reference sequence using the Smith-Waterman algorithm. Base calls with a Q-score below 31 were replaced with Ns and were thus excluded in calculating nucleotide frequencies. This treatment yields an expected MiSeq base-calling error rate of approximately 1 in 1,000. Aligned sequences in which the read and reference sequence contained no gaps were stored in an alignment table from which base frequencies could be tabulated for each locus. Indel frequencies were quantified with a custom Matlab script using previously described criteria (Zuris, et al., Nature Biotechnol. 33, 73-80 (2015). Sequencing reads were scanned for exact matches to two 10-bp sequences that flank both sides of a window in which indels might occur. If no exact matches were located, the read was excluded from analysis. If the length of this indel window exactly matched the reference sequence the read was classified as not containing an indel. If the indel window was two or more bases longer or shorter than the reference sequence, then the sequencing read was classified as an insertion or deletion, respectively.

### SEQUENCES

[0872] Table 8 below presents a representative list of wild-type and variant (E342K) SERPINA1-encoded amino acid sequences and open reading frame (ORF) nucleic acid sequences of the wild-type and variant (E342K) SERPINA1 polynucleotides as utilized in the described embodiments.

TABLE 8
Exemplary Sequences

| | SEQ ID | |
|---|---|---|
| | NO | Sequences |
| SERPINA1 | 296 | MPSSVSWGILLLAGLCCLVPVSLAEDPQGDAAQKTDTSHHD |
| Amino | | QDHPTFNKITPNLAEFAFSLYRQLAHQSNSTNIFFSPVSIATAF |
| acids | | AMLSLGTKADTHDEILEGLNFNLTEIPEAQIHEGFQELLRTLN |
| | | QPDSQLQLTTGNGLFLSEGLKLVDKFLEDVKKLYHSEAFTVN |
| | | FGDTEEAKKQINDYVEKGTQGKIVDLVKELDRDTVFALVNYI |
| | | FFKGKWERPFEVKDTEEEDFHVDQVTTVKVPMMKRLGMFN |
| | | IQHCKKLSSWVLLMKYLGNATAIFFLPDEGKLQHLENELTHD |
| | | IITKFLENEDRRSASLHLPKLSITGTYDLKSVLGQLGITKVFSN |
| | | GADLSGVTEEAPLKLSKAVHKAVLTIDEKGTEAAGAMFLEAI |
| | | PMSIPPEVKFNKPFVFLMIEQNTKSPLFMGKVVNPTQK |
| SERPINA1 | 301 | ATGCCGTCTTCTGTCTCGTGGGGCATCCTCCTGCTGGCAGG |
| ORF | | CCTGTGCTGCCTGGTCCCTGTCTCCCTGGCTGAGGATCCCC |
| | | AGGGAGATGCTGCCCAGAAGACAGATACATCCCACCATG |
| | | ATCAGGATCACCCAACCTTCAACAAGATCACCCCCAACCT |
| | | GGCTGAGTTCGCCTTCAGCCTATACCGCCAGCTGGCACAC |
| | | CAGTCCAACAGCACCAATATCTTCTTCTCCCCAGTGAGCA |
| | | TCGCTACAGCCTTTGCAATGCTCTCCCTGGGGACCAAGGC |
| | | TGACACTCACGATGAAATCCTGGAGGGCCTGAATTTCAAC |
| | | CTCACGGAGATTCCGGAGGCTCAGATCCATGAAGGCTTCC |
| | | AGGAACTCCTCCGTACCCTCAACCAGCCAGACAGCCAGCT |
| | | CCAGCTGACCACCGGCAATGGCCTGTTCCTCAGCGAGGGC |
| | | CTGAAGCTAGTGGATAAGTTTTTGGAGGATGTTAAAAAGT |
| | | TGTACCACTCAGAAGCCTTCACTGTCAACTTCGGGGACAC |
| | | CGAAGAGGCCAAGAAACAGATCAACGATTACGTGGAGAA |
| | | GGGTACTCAAGGGAAAATTGTGGATTTGGTCAAGGAGCTT |
| | | GACAGAGACACAGTTTTTGCTCTGGTGAATTACATCTTCTT |
| | | TAAAGGCAAATGGGAGAGACCCTTTGAAGTCAAGGACAC |
| | | CGAGGAAGAGGACTTCCACGTGGACCAGGTGACCACCGT |
| | | GAAGGTGCCTATGATGAAGCGTTTAGGCATGTTTAACATC |
| | | CAGCACTGTAAGAAGCTGTCCAGCTGGGTGCTGCTGATGA |
| | | AATACCTGGGCAATGCCACCGCCATCTTCTTCCTGCCTGAT |
| | | GAGGGGAAACTACAGCACCTGGAAAATGAACTCACCCAC |
| | | GATATCATCACCAAGTTCCTGGAAAATGAAGACAGAAGGT |
| | | CTGCCAGCTTACATTTACCCAAACTGTCCATTACTGGAACC |
| | | TATGATCTGAAGAGCGTCCTGGGTCAACTGGGCATCACTA |
| | | AGGTCTTCAGCAATGGGGCTGACCTCTCCGGGGTCACAGA |
| | | GGAGGCACCCCTGAAGCTCTCCAAGGCCGTGCATAAGGCT |
| | | GTGCTGACCATCGACGAGAAAGGGACTGAAGCTGCTGGG |
| | | GCCATGTTTTTAGAGGCCATACCCATGTCTATCCCCCCCGA |
| | | GGTCAAGTTCAACAAACCCTTTGTCTTCTTAATGATTGAAC |
| | | AAAATACCAAGTCTCCCCTCTTCATGGGAAAAGTGGTGAA |
| | | TCCCACCCAAAAA |
| SERPINA1 | 302 | MPSSVSWGILLLAGLCCLVPVSLAEDPQGDAAQKTDTSHHD |
| E342K | | QDHPTFNKITPNLAEFAFSLYRQLAHQSNSTNIFFSPVSIATAF |
| Amino | | AMLSLGTKADTHDEILEGLNFNLTEIPEAQIHEGFQELLRTLN |
| Acids | | QPDSQLQLTTGNGLFLSEGLKLVDKFLEDVKKLYHSEAFTVN |
| | | FGDTEEAKKQINDYVEKGTQGKIVDLVKELDRDTVFALVNYI |
| | | FFKGKWERPFEVKDTEEEDFHVDQVTTVKVPMMKRLGMFN |
| | | IQHCKKLSSWVLLMKYLGNATAIFFLPDEGKLQHLENELTHD |
| | | IITKFLENEDRRSASLHLPKLSITGTYDLKSVLGQLGITKVFSN |
| | | GADLSGVTEEAPLKLSKAVHKAVLTIDKKGTEAAGAMFLEA |
| | | IPMSIPPEVKFNKPFVFLMIEQNTKSPLFMGKVVNPTQK |
| SERPINA1 | 303 | ATGCCGTCTTCTGTCTCGTGGGGCATCCTCCTGCTGGCAGG |
| E342K | | CCTGTGCTGCCTGGTCCCTGTCTCCCTGGCTGAGGATCCCC |
| ORF | | AGGGAGATGCTGCCCAGAAGACAGATACATCCCACCATG |
| | | ATCAGGATCACCCAACCTTCAACAAGATCACCCCCAACCT |
| | | GGCTGAGTTCGCCTTCAGCCTATACCGCCAGCTGGCACAC |
| | | CAGTCCAACAGCACCAATATCTTCTTCTCCCCAGTGAGCA |
| | | TCGCTACAGCCTTTGCAATGCTCTCCCTGGGGACCAAGGC |
| | | TGACACTCACGATGAAATCCTGGAGGGCCTGAATTTCAAC |
| | | CTCACGGAGATTCCGGAGGCTCAGATCCATGAAGGCTTCC |
| | | AGGAACTCCTCCGTACCCTCAACCAGCCAGACAGCCAGCT |
| | | CCAGCTGACCACCGGCAATGGCCTGTTCCTCAGCGAGGGC |
| | | CTGAAGCTAGTGGATAAGTTTTTGGAGGATGTTAAAAAGT |
| | | TGTACCACTCAGAAGCCTTCACTGTCAACTTCGGGGACAC |
| | | CGAAGAGGCCAAGAAACAGATCAACGATTACGTGGAGAA |
| | | GGGTACTCAAGGGAAAATTGTGGATTTGGTCAAGGAGCTT |
| | | GACAGAGACACAGTTTTTGCTCTGGTGAATTACATCTTCTT |
| | | TAAAGGCAAATGGGAGAGACCCTTTGAAGTCAAGGACAC |
| | | CGAGGAAGAGGACTTCCACGTGGACCAGGTGACCACCGT |
| | | GAAGGTGCCTATGATGAAGCGTTTAGGCATGTTTAACATC |
| | | CAGCACTGTAAGAAGCTGTCCAGCTGGGTGCTGCTGATGA |
| | | AATACCTGGGCAATGCCACCGCCATCTTCTTCCTGCCTGAT |
| | | GAGGGGAAACTACAGCACCTGGAAAATGAACTCACCCAC |
| | | GATATCATCACCAAGTTCCTGGAAAATGAAGACAGAAGGT |
| | | CTGCCAGCTTACATTTACCCAAACTGTCCATTACTGGAACC |
| | | TATGATCTGAAGAGCGTCCTGGGTCAACTGGGCATCACTA |
| | | AGGTCTTCAGCAATGGGGCTGACCTCTCCGGGGTCACAGA |
| | | GGAGGCACCCCTGAAGCTCTCCAAGGCCGTGCATAAGGCT |
| | | GTGCTGACCATCGACaAGAAAGGGACTGAAGCTGCTGGGG |
| | | CCATGTTTTTAGAGGCCATACCCATGTCTATCCCCCCCGAG |
| | | GTCAAGTTCAACAAACCCTTTGTCTTCTTAATGATTGAACA |
| | | AAATACCAAGTCTCCCCTCTTCATGGGAAAAGTGGTGAAT |
| | | CCCACCCAAAAA |

1. A method of editing a SERPINA1 polynucleotide comprising a single nucleotide polymorphism (SNP) associated with alpha-1 Anti-Trypsin Deficiency (A1AD), the method comprising contacting the SERPINA1 polynucleotide with a base editor in complex with one or more guide polynucleotides, wherein the base editor comprises a polynucleotide programmable DNA binding domain and an adenosine deaminase domain, and wherein one or more of the guide polynucleotides target the base editor to effect an A⋅T to G⋅C alteration of the SNP associated with A1AD.

2. The method of claim 1, wherein the contacting is in a cell, a eukaryotic cell, a mammalian cell, or a human cell.

3. The method of claim 1, wherein the cell is in vivo or ex vivo.

4. The method of claim 1, wherein the A⋅T to G⋅C alteration at the SNP associated with A1AD changes a lysine to a glutamic acid in the alpha-1 Anti-Trypsin (A1AT) polypeptide; or
wherein the SNP associated with A1AD results in expression of an A1AT polypeptide having a lysine at amino acid position 342; or
wherein the base editor correction replaces the lysine at position 342 with a glutamic acid.

5-6. (canceled)

7. The method of claim 1, wherein the polynucleotide programmable DNA binding domain is a modified Streptococcus pyogenes Cas9 (SpCas9), or variants thereof; or
wherein the polynucleotide programmable DNA binding domain comprises a modified SpCas9 having an altered protospacer-adjacent motif (PAM) specificity.

8-9. (canceled)

10. The method of claim 8, wherein the modified SpCas9 comprises the amino acid substitution D1332A and one or more of D1135M, S1137Q, G1218K, E1219F, D1332A, R1335E, and T1337R, or corresponding amino acid substitutions thereof; or
wherein the modified SpCas9 comprises amino acid substitutions D1135M, S1137Q, G1218K, E1219F, A1322R, D1332A, R1335E, and T1337R, or corresponding amino acid substitutions thereof.

11-13. (canceled)

14. The method of claim 1, wherein the polynucleotide programmable DNA binding domain is a nuclease inactive or nickase variant.

15-17. (canceled)

18. The method of claim 1, wherein the adenosine deaminase is a TadA deaminase.

19. The method of claim 18, wherein the TadA deaminase is TadA*7.10.

20. The method of claim 1, wherein the one or more guide RNAs comprises a CRISPR RNA (crRNA) and a trans-encoded small RNA (tracrRNA), wherein the crRNA comprises a nucleic acid sequence complementary to a SERPINA1 nucleic acid sequence comprising the SNP associated with A1AD; or
wherein the base editor is in complex with a single guide RNA (sgRNA) comprising a nucleic acid sequence complementary to an SERPINA1 nucleic acid sequence comprising the SNP associated with A1AD.

21. The method of claim 1, wherein the base editor is in complex with a single guide RNA (sgRNA) comprising a nucleic acid sequence complementary to an SERPINA1 nucleic acid sequence comprising the SNP associated with A1AD.

22. A cell produced by introducing into the cell, or a progenitor thereof:
a base editor, a polynucleotide encoding the base editor, to the cell, wherein the base editor comprises a polynucleotide programmable DNA binding domain and an adenosine deaminase domain; and
one or more guide polynucleotides that target the base editor to effect an A⋅T to G⋅C alteration of the single nucleotide polymorphism (SNP) associated with alpha-1 Anti-Trypsin Deficiency (A1AD).

23. The cell of claim 22, wherein the cell produced is a hepatocyte; or wherein the cell or progenitor thereof is an embryonic stem cell, induced pluripotent stem cell, or a hepatocyte.

24. (canceled)

25. The cell of claim 23, wherein the hepatocyte expresses an A1AT polypeptide.

26. The cell of claim 22, wherein the cell is from a subject having A1AD.

27-50. (canceled)

51. A method of treating alpha-1 Anti-Trypsin Deficiency (A1AD) in a subject, the method comprising: administering to a subject in need thereof a cell of claim 22; or
a base editor, or a polynucleotide encoding the base editor, wherein the base editor comprises a polynucleotide programmable DNA binding domain and an adenosine deaminase domain; and
one or more guide polynucleotides that target the base editor to effect an A⋅T to G⋅C alteration of the single nucleotide polymorphism (SNP) associated with A1AD.

52. (canceled)

53. The method of claim 51, comprising delivering the base editor, or polynucleotide encoding the base editor, and the one or more guide polynucleotides to a cell of the subject.

54. The method of claim 51, wherein the cell is a hepatocyte or wherein the cell is a progenitor of a hepatocyte.

55. (canceled)

56. The method of claim 54, wherein the cell expresses an A1AT polypeptide comprising a mutation.

57-74. (canceled)

75. A method of producing a hepatocyte, or progenitor thereof, the method comprising:
(a) introducing into an induced pluripotent stem cell or hepatocyte progenitor comprising a single nucleotide polymorphism (SNP) associated with alpha-1 Anti-Trypsin Deficiency (A1AD),
a base editor, or a polynucleotide encoding the base editor, wherein the base editor comprises a polynucleotide-programmable nucleotide-binding domain and an adenosine deaminase domain; and
one or more guide polynucleotides, wherein the one or more guide polynucleotides target the base editor to effect an A⋅T to G⋅C alteration of the SNP associated with A1AD; and
(b) differentiating the induced pluripotent stem cell or hepatocyte progenitor into hepatocyte.

76. The method of claim 75, comprising differentiating the induced pluripotent stem cell into a hepatocyte or progenitor thereof.

77. The method of claim 75, wherein the induced pluripotent stem cell of step (a) comprises an E342K mutation.

78. The method of claim 75, wherein the hepatocyte progenitor is obtained from a subject having A1AD.

79-97. (canceled)

98. The method of claim 75, wherein the base editor and the one or more guide polynucleotides form a complex in the cell; or
wherein the base editor is in complex with a single guide RNA (sgRNA) comprising a nucleic acid sequence complementary to a SERPINA1 nucleic acid sequence comprising the SNP associated with A1AD.

99. (canceled)

100. A base editor comprising:
(i)
MSEVEFSHEYWMRHALTLAKRAWDEREVPVGAVLVHNNRVIGEGWNRPIGRHDPTAHAE IMALRQGGLVMQNYRLIDATLYVTLEPCVMCAGAMIHSRIGRVVFGARDAKTGAAGSLM DVLHHPGMNHRVEITEGILADECAALLSDFFRMRRQEIKAQKKAQSSTDSGGSSGGSSGSE TPGTSESATPESSGGSSGGSSEVEFSHEYWMRHALTLAKRARDEREVPVGAVLVLNNRVIG EGWNRAIGLHDPTAHAEIIVIALRQGGLVMQNYRLIDATLYVTFEPCVMCAGAMIHSRIGRV VFGVRNAKTGAAGSLMDVLHYPGMNHRVEITEGILADECAALLCYFFRMPRQVFNAQKK AQSSTDSGGSSGGSSGSETPGTSESATPESSGGSSGGSDKKYSIGLAIGTNSVGWAVITDEYK VPSKKFKVLGNTDRHSIKKNLIGALLFDSGETAEATRLKRTARRRYTRRKNRICYLQEIFSN EMAKVDDSFFHRLEESFLVEEDKKHERHPIFGNIVDEVAYHEKYPTIYHLRKKLVDSTDKA DLRLIYLALAHMIKFRGHFLIEGDLNPDNSDVDKLFIQLVQTYNQLFEENPINASGVDAKAI LSARLSKSRRLENLIAQLPGEKKNGLFGNLIALSLGLTPNFKSNFDLAEDAKLQLSKDTYDD DLDNLLAQIGDQYADLFLAAKNLSDAILLSDILRVNTEITKAPLSASMIKRYDEHHQDLTLL KALVRQQLPEKYKEIFFDQSKNGYAGYIDGGASQEEFYKFIKPILEKMDGTEELLVKLNRE DLLRKQRTFDNGSIPHQIHLGELHAILRRQEDFYPFLKDNREKIEKILTFRIPYYVGPLARGN SRFAWMTRKSEETITPWNFEEVVDKGASAQSFIERMTNFDKNLPNEKVLPKHSLLYEYFTV YNELTKVKYVTEGMRKPAFLSGEQKKAIVDLLFKTNRKVTVKQLKEDYFKKIECFDSVEIS GVEDRFNASLGTYHDLLKIIKDKDFLDNEENEDILEDIVLTLTLFEDREMIEERLKTYAHLFD DKVMKQLKRRRYTGWGRLSRKLINGIRDKQSGKTILDFLKSDGFANRNFMQLIHDDSLTFK EDIQKAQVSGQGDSLHEHIANLAGSPAIKKGILQTVKVVDELVKVMGRHKPENIVIEMARE NQTTQKGQKNSRERMKRIEEGIKELGSQILKEHPVENTQLQNEKLYLYYLQNGRDMYVDQ ELDINRLSDYDVDHIVPQSFLKDDSIDNKVLTRSDKNRGKSDNVPSEEVVKKMKNYWRQL LNAKLITQRKFDNLTKAERGGLSELDKAGFIKRQLVETRQITKHVAQILDSRMNTKYDEND KLIREVKVITLKSKLVSDFRKDFQFYKVREINNYHHAHDAYLNAVVGTALIKKYPKLESEF VYGDYKVYDVRKMIAKSEQEIGKATAKYFFYSNIMNFFKTEITLANGEIRKRPLIETNGETG EIVWDKGRDFATVRKVLSMPQVNIVKKTEVQTGGFSKESILPKRNSDKLIARKKDWDPKK YGGFmqPTVAYSVLVVAKVEKGKSKKLKSVKELLGITIMERSSFEKNPIDFLEAKGYKEVK KDLIIKLPKYSLFELENGRKRMLASAkfLQKGNELALPSKYVNFLYLASHYEKLKGSPEDNE QKQLFVEQHKHYLDEIIEQISEFSKRVILADANLDKVLSAYNKHRDKPIREQAENIIHLFTLT NLGAPrAFKYFDTTIaRKeYrSTKEVLDATLIHQSITGLYETRIDLSQLGGDEGADKRTADGSE FESPKKKRK (SEQ ID NO: 39); and
(ii) an adenosine deaminase domain.

101. A guide RNA comprising a nucleic acid sequence selected from the group consisting of:
(SEQ ID NO: 2)
5′- GUUUUAGAGCUAGAAAUAGCAAGUUAAAAUAAGGCUAGUCCGUUAU
CAACUUGAAAAAGUGGCACCGAGUCGGUGCUUUU-3′;
(SEQ ID NO: 3)
5′-ACCAUCGACAAGAAAGGGACUGAGUUUUAGAGCUAGAAAUAGCAAGU
UAAAAUAAGGCUAGUCCGUUAUCAACUUGAAAAAGUGGCACCGAGUCGGU
GCUUUU-3′;
(SEQ ID NO: 4)
5′-CCAUCGACAAGAAAGGGACUGAGUUUUAGAGCUAGAAAUAGCAAGUU
AAAAUAAGGCUAGUCCGUUAUCAACUUGAAAAAGUGGCACCGAGUCGGUG
CUUUU-3′;
(SEQ ID NO: 5)
5′-CAUCGACAAGAAAGGGACUGAGUUUUAGAGCUAGAAAUAGCAAGUUA
AAAUAAGGCUAGUCCGUUAUCAACUUGAAAAAGUGGCACCGAGUCGGUGC
UUUU-3′;
(SEQ ID NO: 6)
5′-AUCGACAAGAAAGGGACUGAGUUUUAGAGCUAGAAAUAGCAAGUUAA
AAUAAGGCUAGUCCGUUAUCAACUUGAAAAAGUGGCACCGAGUCGGUGCU
UUU-3′;
(SEQ ID NO: 7)
5′-UCGACAAGAAAGGGACUGAGUUUUAGAGCUAGAAAUAGCAAGUUAAA
AUAAGGCUAGUCCGUUAUCAACUUGAAAAAGUGGCACCGAGUCGGUGCUU
UU-3′;
and
(SEQ ID NO: 8)
5′-CGACAAGAAAGGGACUGAGUUUUAGAGCUAGAAAUAGCAAGUUAAAA
UAAGGCUAGUCCGUUAUCAACUUGAAAAAGUGGCACCGAGUCGGUGCUUU
U-3′.

102. A protein nucleic acid complex comprising the base editor of claim 100 and a guide RNA.

103. A base editor system for correcting a pathogenic single nucleotide polymorphism (SNP) in a gene, wherein the base editor system comprises:
(a) a base editor comprising:
(i) a polynucleotide-programmable DNA-binding domain, and
(ii) a deaminase domain capable of deaminating the pathogenic SNP or its complement nucleobase; and
(b) a guide polynucleotide in conjunction with the polynucleotide-programmable DNA-binding domain, wherein the guide polynucleotide targets the base editor to a target polynucleotide sequence at least a portion of which is located in the gene or its reverse complement;
wherein deaminating the pathogenic SNP or its complement nucleobase results in a conversion of the pathogenic SNP to its wild-type allele, thereby correcting a pathogenic mutation listed in Table 3A or Table 3B.

104. A method for correcting a pathogenic single nucleotide polymorphism (SNP) in a gene comprising:
contacting a target nucleotide sequence, at least a portion of which is located in the gene or its reverse complement, with a base editor comprising:
(i) a polynucleotide-programmable DNA-binding domain in conjunction with a guide polynucleotide that targets the base editor to the target polynucleotide sequence, at least a portion of which is located in the gene or its reverse complement, and
(ii) a deaminase domain capable of deaminating the pathogenic SNP or its complement nucleobase; and
editing the pathogenic SNP by deaminating the pathogenic SNP or its complement nucleobase upon targeting of the base editor to the target nucleotide sequence,
wherein deaminating the pathogenic SNP or its complement nucleobase results in a conversion of the pathogenic SNP to its wild-type allele, thereby correcting a pathogenic mutation.

105. A method for correcting a pathogenic single nucleotide polymorphism (SNP) in a gene comprising:
contacting a target nucleotide sequence, at least a portion of which is located in the gene or its reverse complement, with a base editor comprising:
(i) a polynucleotide-programmable DNA-binding domain in conjunction with a guide polynucleotide that targets the base editor to the target polynucleotide sequence, at least a portion of which is located in the gene or its reverse complement, and
(ii) a deaminase domain capable of deaminating the pathogenic SNP or its complement nucleobase; and
editing the pathogenic SNP by deaminating the pathogenic SNP or its complement nucleobase upon targeting of the base editor to the target nucleotide sequence,
wherein deaminating the pathogenic SNP or its complement nucleobase results in a conversion of the pathogenic SNP to its wild-type allele, thereby correcting a pathogenic mutation listed in Table 3A or Table 3B.

106. A method of treating a genetic disorder in a subject by correcting a pathogenic single nucleotide polymorphism (SNP) in a gene, the method comprising:
administering a base editor, or a polynucleotide encoding the base editor, to a subject in need thereof, wherein the base editor comprises:
(i) a polynucleotide-programmable DNA-binding domain, and
(ii) a deaminase domain capable of deaminating the pathogenic SNP or its complement nucleobase; and
administering a guide polynucleotide to the subject, wherein the guide polynucleotide targets the base editor to a target nucleotide sequence at least a portion of which is located in the gene or its reverse complement; and
editing the pathogenic SNP by deaminating the pathogenic SNP or its complement nucleobase upon targeting of the base editor to the target nucleotide sequence,
wherein deaminating the pathogenic SNP or its complement nucleobase results in a conversion of the pathogenic SNP to its wild-type allele, thereby correcting a pathogenic mutation listed in Table 3A or Table 3B and treating the genetic disorder.

107. A method of producing a cell, tissue, or organ for treating a genetic disorder in a subject in need thereof by correcting a pathogenic single nucleotide polymorphism (SNP) in a gene of the cell, tissue, or organ, the method comprising:
contacting the cell, tissue, or organ with a base editor, wherein the base editor comprises:
(i) a polynucleotide-programmable DNA-binding domain, and
(ii) a deaminase domain capable of deaminating the pathogenic SNP or its complement nucleobase; and
contacting the cell, tissue, or organ with a guide polynucleotide, wherein the guide polynucleotide targets the base editor to a target nucleotide sequence at least a portion of which is located in the gene or its reverse complement; and
editing the pathogenic SNP by deaminating the pathogenic SNP or its complement nucleobase upon targeting of the base editor to the target nucleotide sequence,
wherein deaminating the pathogenic SNP or its complement nucleobase results in a conversion of the pathogenic SNP to its wild-type allele, thereby correcting a pathogenic mutation listed in Table 3A or Table 3B and producing the cell, tissue, or organ for treating the genetic disorder.

108-136. (canceled)

137. A method of editing a glucose-6-phosphatase (G6PC) polynucleotide comprising a single nucleotide polymorphism (SNP) associated with glycogen storage disorder Type 1a (GSD1a), the method comprising contacting the G6PC polynucleotide with a base editor in complex with one or more guide polynucleotides, wherein the base editor comprises a polynucleotide programmable DNA binding domain and an adenosine deaminase domain, and wherein one or more of the guide polynucleotides target the base editor to effect an A⋅T to G⋅C alteration of the SNP associated with GSD1a.

138-144. (canceled)

145. A cell produced by introducing into the cell, or a progenitor thereof:
a base editor, a polynucleotide encoding the base editor, to the cell, wherein the base editor comprises a polynucleotide programmable DNA binding domain and an adenosine deaminase domain; and
one or more guide polynucleotides that target the base editor to effect an A⋅T to G⋅C alteration of a single nucleotide polymorphism (SNP) associated with glycogen storage disorder Type 1a (GSD1a).

146-150. (canceled)

151. A method of treating glycogen storage disorder Type 1a (GSD1a) or von Gierke Disease in a subject in need thereof, the method comprising administering to the subject the cell of claim 145.

152. A method of producing a hepatocyte, or progenitor thereof, the method comprising:
(a) introducing into an induced pluripotent stem cell or hepatocyte progenitor comprising a single nucleotide polymorphism (SNP) associated with glycogen storage disorder Type 1a (GSD1a),
a base editor, or a polynucleotide encoding the base editor, wherein the base editor comprises a polynucleotide-programmable nucleotide-binding domain and an adenosine deaminase domain; and
one or more guide polynucleotides, wherein the one or more guide polynucleotides target the base editor to effect an A⋅T to G⋅C alteration of the SNP associated with GSD1a; and
(b) differentiating the induced pluripotent stem cell or hepatocyte progenitor into hepatocyte.

153-160. (canceled)

161. A method of editing an alpha-L-iduronidase gene (IDUA) polynucleotide comprising a single nucleotide polymorphism (SNP) associated with mucopolysaccharidosis type 1 (MPS1), the method comprising contacting the IDUA polynucleotide with a base editor in complex with one or more guide polynucleotides, wherein the base editor comprises a polynucleotide programmable DNA binding domain and an adenosine deaminase domain, and wherein one or more of the guide polynucleotides target the base editor to effect an A⋅T to G⋅C alteration of the SNP associated with MPS1.

162-167. (canceled)

168. A cell produced by introducing into the cell, or a progenitor thereof:
a base editor, a polynucleotide encoding the base editor, to the cell, wherein the base editor comprises a polynucleotide programmable DNA binding domain and an adenosine deaminase domain; and
one or more guide polynucleotides that target the base editor to effect an A⋅T to G⋅C alteration of a single nucleotide polymorphism (SNP) associated with mucopolysaccharidosis type 1 (MPS1).

169-170. (canceled)

171. A method of treating mucopolysaccharidosis type 1 (MPS1) in a subject in need thereof, the method comprising administering to the subject the cell of claim 168.

The application's sequence listing, which the Patent Office published only in electronic form, follows.

SEQUENCE LISTING (315 sequences)

SEQ ID NO: 1 - protein, 1785 aa, Unknown
  Description of Unknown: Base editor sequence
MSEVEFSHEYWMRHALTLAKRAWDEREVPVGAVLVHNNRVIGEGWNRPIGRHDPTAHAEIMALRQGGLVMQNYRLIDATLYVTLEPCVMCAGAMIHSRIGRVVFGARDAKTGAAGSLMDVLHHPGMNHRVEITEGILADECAALLSDFFRMRRQEIKAQKKAQSSTDSGGSSGGSSGSETPGTSESATPESSGGSSGGSSEVEFSHEYWMRHALTLAKRARDEREVPVGAVLVLNNRVIGEGWNRAIGLHDPTAHAEIMALRQGGLVMQNYRLIDATLYVTFEPCVMCAGAMIHSRIGRVVFGVRNAKTGAAGSLMDVLHYPGMNHRVEITEGILADECAALLCYFFRMPRQVFNAQKKAQSSTDSGGSSGGSSGSETPGTSESATPESSGGSSGGSDKKYSIGLAIGTNSVGWAVITDEYKVPSKKFKVLGNTDRHSIKKNLIGALLFDSGETAEATRLKRTARRRYTRRKNRICYLQEIFSNEMAKVDDSFFHRLEESFLVEEDKKHERHPIFGNIVDEVAYHEKYPTIYHLRKKLVDSTDKADLRLIYLALAHMIKFRGHFLIEGDLNPDNSDVDKLFIQLVQTYNQLFEENPINASGVDAKAILSARLSKSRRLENLIAQLPGEKKNGLFGNLIALSLGLTPNFKSNFDLAEDAKLQLSKDTYDDDLDNLLAQIGDQYADLFLAAKNLSDAILLSDILRVNTEITKAPLSASMIKRYDEHHQDLTLLKALVRQQLPEKYKEIFFDQSKNGYAGYIDGGASQEEFYKFIKPILEKMDGTEELLVKLNREDLLRKQRTFDNGSIPHQIHLGELHAILRRQEDFYPFLKDNREKIEKILTFRIPYYVGPLARGNSRFAWMTRKSEETITPWNFEEVVDKGASAQSFIERMTNFDKNLPNEKVLPKHSLLYEYFTVYNELTKVKYVTEGMRKPAFLSGEQKKAIVDLLFKTNRKVTVKQLKEDYFKKIECFDSVEISGVEDRFNASLGTYHDLLKIIKDKDFLDNEENEDILEDIVLTLTLFEDREMIEERLKTYAHLFDDKVMKQLKRRRYTGWGRLSRKLINGIRDKQSGKTILDFLKSDGFANRNFMQLIHDDSLTFKEDIQKAQVSGQGDSLHEHIANLAGSPAIKKGILQTVKVVDELVKVMGRHKPENIVIEMARENQTTQKGQKNSRERMKRIEEGIKELGSQILKEHPVENTQLQNEKLYLYYLQNGRDMYVDQELDINRLSDYDVDHIVPQSFLKDDSIDNKVLTRSDKNRGKSDNVPSEEVVKKMKNYWRQLLNAKLITQRKFDNLTKAERGGLSELDKAGFIKRQLVETRQITKHVAQILDSRMNTKYDENDKLIREVKVITLKSKLVSDFRKDFQFYKVREINNYHHAHDAYLNAVVGTALIKKYPKLESEFVYGDYKVYDVRKMIAKSEQEIGKATAKYFFYSNIMNFFKTEITLANGEIRKRPLIETNGETGEIVWDKGRDFATVRKVLSMPQVNIVKKTEVQTGGFSKESILPKRNSDKLIARKKDWDPKKYGGFMQPTVAYSVLVVAKVEKGKSKKLKSVKELLGITIMERSSFEKNPIDFLEAKGYKEVKKDLIIKLPKYSLFELENGRKRMLASAKFLQKGNELALPSKYVNFLYLASHYEKLKGSPEDNEQKQLFVEQHKHYLDEIIEQISEFSKRVILADANLDKVLSAYNKHRDKPIREQAENIIHLFTLTNLGAPRAFKYFDTTIARKEYRSTKEVLDATLIHQSITGLYETRIDLSQLGGDEGADKRTADGSEFESPKKKRK

SEQ ID NO: 2 - RNA, 80 nt, Artificial Sequence
  Description of Artificial Sequence: Synthetic oligonucleotide
guuuuagagcuagaaauagcaaguuaaaauaaggcuaguccguuaucaacuugaaaaaguggcaccgagucggugcuuuu

SEQ ID NO: 3 - RNA, 103 nt, Artificial Sequence
  Description of Artificial Sequence: Synthetic polynucleotide
accaucgacaagaaagggacugaguuuuagagcuagaaauagcaaguuaaaauaaggcuaguccguuaucaacuugaaaaaguggcaccgagucggugcuuuu

SEQ ID NO: 4 - RNA, 102 nt, Artificial Sequence
  Description of Artificial Sequence: Synthetic polynucleotide
ccaucgacaagaaagggacugaguuuuagagcuagaaauagcaaguuaaaauaaggcuaguccguuaucaacuugaaaaaguggcaccgagucggugcuuuu

SEQ ID NO: 5 - RNA, 101 nt, Artificial Sequence
  Description of Artificial Sequence: Synthetic polynucleotide
caucgacaagaaagggacugaguuuuagagcuagaaauagcaaguuaaaauaaggcuaguccguuaucaacuugaaaaaguggcaccgagucggugcuuuu

SEQ ID NO: 6 - RNA, 100 nt, Artificial Sequence
  Description of Artificial Sequence: Synthetic polynucleotide
aucgacaagaaagggacugaguuuuagagcuagaaauagcaaguuaaaauaaggcuaguccguuaucaacuugaaaaaguggcaccgagucggugcuuuu

SEQ ID NO: 7 - RNA, 99 nt, Artificial Sequence
  Description of Artificial Sequence: Synthetic oligonucleotide
ucgacaagaaagggacugaguuuuagagcuagaaauagcaaguuaaaauaaggcuaguccguuaucaacuugaaaaaguggcaccgagucggugcuuuu

SEQ ID NO: 8 - RNA, 98 nt, Artificial Sequence
  Description of Artificial Sequence: Synthetic oligonucleotide
cgacaagaaagggacugaguuuuagagcuagaaauagcaaguuaaaauaaggcuaguccguuaucaacuugaaaaaguggcaccgagucggugcuuuu

SEQ ID NO: 9 - DNA, 23 bp, Artificial Sequence
  Description of Artificial Sequence: Synthetic oligonucleotide
actctaggcagaggtctcaaagg

SEQ ID NO: 10 - DNA, 23 bp, Artificial Sequence
  Description of Artificial Sequence: Synthetic oligonucleotide
gctctaggccgaagtgtcgcagg

SEQ ID NO: 11 - protein, 418 aa, Homo sapiens
MPSSVSWGILLLAGLCCLVPVSLAEDPQGDAAQKTDTSHHDQDHPTFNKITPNLAEFAFSLYRQLAHQSNSTNIFFSPVSIATAFAMLSLGTKADTHDEILEGLNFNLTEIPEAQIHEGFQELLRTLNQPDSQLQLTTGNGLFLSEGLKLVDKFLEDVKKLYHSEAFTVNFGDTEEAKKQINDYVEKGTQGKIVDLVKELDRDTVFALVNYIFFKGKWERPFEVKDTEEEDFHVDQVTTVKVPMMKRLGMFNIQHCKKLSSWVLLMKYLGNATAIFFLPDEGKLQHLENELTHDIITKFLENEDRRSASLHLPKLSITGTYDLKSVLGQLGITKVFSNGADLSGVTEEAPLKLSKAVHKAVLTIDEKGTEAAGAMFLEAIPMSIPPEVKFNKPFVFLMIEQNTKSPLFMGKVVNPTQK

SEQ ID NO: 12 - DNA, 8877 bp, Unknown
  Description of Unknown: BE4 sequence
atatgccaagtacgccccctattgacgtcaatgacggtaaatggcccgcctggcattatgcccagtacatgaccttatgggactttcctacttggcagtacatctacgtattagtcatcgctattaccatggtgatgcggttttggcagtacatcaatgggcgtggatagcggtttgactcacggggatttccaagtctccaccccattgacgtcaatgggagtttgttttggcaccaaaatcaacgggactttccaaaatgtcgtaacaactccgccccattgacgcaaatgggcggtaggcgtgtacggtgggaggtctatataagcagagctggtttagtgaaccgtcagatccgctagagatccgcggccgctaatacgactcactatagggagagccgccaccatgagctcagagactggcccagtggctgtggaccccacattgagacggcggatcgagccccatgagtttgaggtattcttcgatccgagagagctccgcaaggagacctgcctgctttacgaaattaattgggggggccggcactccatttggcgacatacatcacagaacactaacaagcacgtcgaagtcaacttcatcgagaagttcacgacagaaagatatttctgtccgaacacaaggtgcagcattacctggtttctcagctggagcccatgcggcgaatgtagtagggccatcactgaattcctgtcaaggtatccccacgtcactctgtttatttacatcgcaaggctgtaccaccacgctgacccccgcaatcgacaaggcctgcgggatttgatctcttcaggtgtgactatccaaattatgactgagcaggagtcaggatactgctggagaaactttgtgaattatagcccgagtaatgaagcccactggcctaggtatccccatctgtgggtacgactgtacgttcttgaactgtactgcatcatactgggcctgcctccttgtctcaacattctgagaaggaagcagccacagctgacattctttaccatcgctcttcagtcttgtcattaccagcgactgcccccacacattctctgggccaccgggttgaaatctggtggttcttctggtggttctagcggcagcgagactcccgggacctcagagtccgccacacccgaaagttctggtggttcttctggtggttctgataaaaagtattctattggtttagccatcggcactaattccgttggatgggctgtcataaccgatgaatacaaagtaccttcaaagaaatttaaggtgttggggaacacagaccgtcattcgattaaaaagaatcttatcggtgccctcctattcgatagtggcgaaacggcagaggcgactcgcctgaaacgaaccgctcggagaaggtatacacgtcgcaagaaccgaatatgttacttacaagaaatttttagcaatgagatggccaaagttgacgattctttctttcaccgtttggaagagtccttccttgtcgaagaggacaagaaacatgaacggcaccccatctttggaaacatagtagatgaggtggcatatcatgaaaagtacccaacgatttatcacctcagaaaaaagctagttgactcaactgataaagcggacctgaggttaatctacttggctcttgcccatatgataaagttccgtgggcactttctcattgagggtgatctaaatccggacaactcggatgtcgacaaactgttcatccagttagtacaaacctataatcagttgtttgaagagaaccctataaatgcaagtggcgtggatgcgaaggctattcttagcgcccgcctctctaaatcccgacggctagaaaacctgatcgcacaattacccggagagaagaaaaatgggttgttcggtaaccttatagcgctctcactaggcctgacaccaaattttaagtcgaacttcgacttagctgaagatgccaaattgcagcttagtaaggacacgtacgatgacgatctcgacaatctactggcacaaattggagatcagtatgcggacttatttttggctgccaaaaaccttagcgatgcaatcctcctatctgacatactgagagttaatactgagattaccaaggcgccgttatccgcttcaatgatcaaaaggtacgatgaacatcaccaagacttgacacttctcaaggccctagtccgtcagcaactgcctgagaaatataaggaaatattctttgatcagtcgaaaaacgggtacgcaggttatattgacggcggagcgagtcaagaggaattctacaagtttatcaaacccatattagagaagatggatgggacggaagagttgcttgtaaaactcaatcgcgaagatctactgcgaaagcagcggactttcgacaacggtagcattccacatcaaatccacttaggcgaattgcatgctatacttagaaggcaggaggatttttatccgttcctcaaagacaatcgtgaaaagattgagaaaatcctaacctttcgcataccttactatgtgggacccctggcccgagggaactctcggttcgcatggatgacaagaaagtccgaagaaacgattactccatggaattttgaggaagttgtcgataaaggtgcgtcagctcaatcgttcatcgagaggatgaccaactttgacaagaatttaccgaacgaaaaagtattgcctaagcacagtttactttacgagtatttcacagtgtacaatgaactcacgaaagttaagtatgtcactgagggcatgcgtaaacccgcctttctaagcggagaacagaagaaagcaatagtagatctgttattcaagaccaaccgcaaagtgacagttaagcaattgaaagaggactactttaagaaaattgaatgcttcgattctgtcgagatctccggggtagaagatcgatttaatgcgtcacttggtacgtatcatgacctcctaaagataattaaagataaggacttcctggataacgaagagaatgaagatatcttagaagatatagtgttgactcttaccctctttgaagatcgggaaatgattgaggaaagactaaaaacatacgctcacctgttcgacgataaggttatgaaacagttaaagaggcgtcgctatacgggctggggacgattgtcgcggaaacttatcaacgggataagagacaagcaaagtggtaaaactattctcgattttctaaagagcgacggcttcgccaataggaactttatgcagctgatccatgatgactctttaaccttcaaagaggatatacaaaaggcacaggtttccggacaaggggactcattgcacgaacatattgcgaatcttgctggttcgccagccatcaaaaagggcatactccagacagtcaaagtagtggatgagctagttaaggtcatgggacgtcacaaaccggaaaacattgtaatcgagatggcacgcgaaaatcaaacgactcagaaggggcaaaaaaacagtcgagagcggatgaagagaatagaagagggtattaaagaactgggcagccagatcttaaaggagcatcctgtggaaaatacccaattgcagaacgagaaactttacctctattacctacaaaatggaagggacatgtatgttgatcaggaactggacataaaccgtttatctgattacgacgtcgatcacattgtaccccaatcctttttgaaggacgattcaatcgacaataaagtgcttacacgctcggataagaaccgagggaaaagtgacaatgttccaagcgaggaagtcgtaaagaaaatgaagaactattggcggcagctcctaaatgcgaaactgataacgcaaagaaagttcgataacttaactaaagctgagaggggtggcttgtctgaacttgacaaggccggatttattaaacgtcagctcgtggaaacccgccaaatcacaaagcatgttgcacagatactagattcccgaatgaatacgaaatacgacgagaacgataagctgattcgggaagtcaaagtaatcactttaaagtcaaaattggtgtcggacttcagaaaggattttcaattctataaagttagggagataaataactaccaccatgcgcacgacgcttatcttaatgccgtcgtagggaccgcactcattaagaaatacccgaagctagaaagtgagtttgtgtatggtgattacaaagtttatgacgtccgtaagatgatcgcgaaaagcgaacaggagataggcaaggctacagccaaatacttcttttattctaacattatgaatttctttaagacggaaatcactctggcaaacggagagatacgcaaacgacctttaattgaaaccaatggggagacaggtgaaatcgtatgggataagggccgggacttcgcgacggtgagaaaagttttgtccatgccccaagtcaacatagtaaagaaaactgaggtgcagaccggagggttttcaaaggaatcgattcttccaaaaaggaatagtgataagctcatcgctcgtaaaaaggactgggacccgaaaaagtacggtggcttcgatagccctacagttgcctattctgtcctagtagtggcaaaagttgagaagggaaaatccaagaaactgaagtcagtcaaagaattattggggataacgattatggagcgctcgtcttttgaaaagaaccccatcgacttccttgaggcgaaaggttacaaggaagtaaaaaaggatctcataattaaactaccaaagtatagtctgtttgagttagaaaatggccgaaaacggatgttggctagcgccggagagcttcaaaaggggaacgaactcgcactaccgtctaaatacgtgaatttcctgtatttagcgtcccattacgagaagttgaaaggttcacctgaagataacgaacagaagcaactttttgttgagcagcacaaacattatctcgacgaaatcatagagcaaatttcggaattcagtaagagagtcatcctagctgatgccaatctggacaaagtattaagcgcatacaacaagcacagggataaacccatacgtgagcaggcggaaaatattatccatttgtttactcttaccaacctcggcgctccagccgcattcaagtattttgacacaacgatagatcgcaaacgatacacttctaccaaggaggtgctagacgcgacactgattcaccaatccatcacgggattatatgaaactcggatagatttgtcacagcttgggggtgactctggtggttctggaggatctggtggttctactaatctgtcagatattattgaaaaggagaccggtaagcaactggttatccaggaatccatcctcatgctcccagaggaggtggaagaagtcattgggaacaagccggaaagcgatatactcgtgcacaccgcctacgacgagagcaccgacgagaatgtcatgcttctgactagcgacgcccctgaatacaagccttgggctctggtcatacaggatagcaacggtgagaacaagattaagatgctctctggtggttctggaggatctggtggttctactaatctgtcagatattattgaaaaggagaccggtaagcaactggttatccaggaatccatcctcatgctcccagaggaggtggaagaagtcattgggaacaagccggaaagcgatatactcgtgcacaccgcctacgacgagagcaccgacgagaatgtcatgcttctgactagcgacgcccctgaatacaagccttgggctctggtcatacaggatagcaacggtgagaacaagattaagatgctctctggtggttctcccaagaagaagaggaaagtctaaccggtcatcatcaccatcaccattgagtttaaacccgctgatcagcctcgactgtgccttctagttgccagccatctgttgtttgcccctcccccgtgccttccttgaccctggaaggtgccactcccactgtcctttcctaataaaatgaggaaattgcatcgcattgtctgagtaggtgtcattctattctggggggtggggtggggcaggacagcaagggggaggattgggaagacaatagcaggcatgctggggatgcggtgggctctatggcttctgaggcggaaagaaccagctggggctcgataccgtcgacctctagctagagcttggcgtaatcatggtcatagctgtttcctgtgtgaaattgttatccgctcacaattccacacaacatacgagccggaagcataaagtgtaaagcctagggtgcctaatgagtgagctaactcacattaattgcgttgcgctcactgcccgctttccagtcgggaaacctgtcgtgccagctgcattaatgaatcggccaacgcgcggggagaggcggtttgcgtattgggcgctcttccgcttcctcgctcactgactcgctgcgctcggtcgttcggctgcggcgagcggtatcagctcactcaaaggcggtaatacggttatccacagaatcaggggataacgcaggaaagaacatgtgagcaaaaggccagcaaaaggccaggaaccgtaaaaaggccgcgttgctggcgtttttccataggctccgcccccctgacgagcatcacaaaaatcgacgctcaagtcagaggtggcgaaacccgacaggactataaagataccaggcgtttccccctggaagctccctcgtgcgctctcctgttccgaccctgccgcttaccggatacctgtccgcctttctcccttcgggaagcgtggcgctttctcatagctcacgctgtaggtatctcagttcggtgtaggtcgttcgctccaagctgggctgtgtgcacgaaccccccgttcagcccgaccgctgcgccttatccggtaactatcgtcttgagtccaacccggtaagacacgacttatcgccactggcagcagccactggtaacaggattagcagagcgaggtatgtaggcggtgctacagagttcttgaagtggtggcctaactacggctacactagaagaacagtatttggtatctgcgctctgctgaagccagttaccttcggaaaaagagttggtagctcttgatccggcaaacaaaccaccgctggtagcggtggtttttttgtttgcaagcagcagattacgcgcagaaaaaaaggatctcaagaagatcctttgatcttttctacggggtctgacgctcagtggaacgaaaactcacgttaagggattttggtcatgagattatcaaaaaggatcttcacctagatccttttaaattaaaaatgaagttttaaatcaatctaaagtatatatgagtaaacttggtctgacagttaccaatgcttaatcagtgaggcacctatctcagcgatctgtctatttcgttcatccatagttgcctgactccccgtcgtgtagataactacgatacgggagggcttaccatctggccccagtgctgcaatgataccgcgagacccacgctcaccggctccagatttatcagcaataaaccagccagccggaagggccgagcgcagaagtggtcctgcaactttatccgcctccatccagtctattaattgttgccgggaagctagagtaagtagttcgccagttaatagtttgcgcaacgttgttgccattgctacaggcatcgtggtgtcacgctcgtcgtttggtatggcttcattcagctccggttcccaacgatcaaggcgagttacatgatcccccatgttgtgcaaaaaagcggttagctccttcggtcctccgatcgttgtcagaagtaagttggccgcagtgttatcactcatggttatggcagcactgcataattctcttactgtcatgccatccgtaagatgcttttctgtgactggtgagtactcaaccaagtcattctgagaatagtgtatgcggcgaccgagttgctcttgcccggcgtcaatacgggataataccgcgccacatagcagaactttaaaagtgctcatcattggaaaacgttcttcggggcgaaaactctcaaggatcttaccgctgttgagatccagttcgatgtaacccactcgtgcacccaactgatcttcagcatcttttactttcaccagcgtttctgggtgagcaaaaacaggaaggcaaaatgccgcaaaaaagggaataagggcgacacggaaatgttgaatactcatactcttcctttttcaatattattgaagcatttatcagggttattgtctcatgagcggatacatatttgaatgtatttagaaaaataaacaaataggggttccgcgcacatttccccgaaaagtgccacctgacgtcgacggatcgggagatcgatctcccgatcccctagggtcgactctcagtacaatctgctctgatgccgcatagttaagccagtatctgctccctgcttgtgtgttggaggtcgctgagtagtgcgcgagcaaaatttaagctacaacaaggcaaggcttgaccgacaattgcatgaagaatctgcttagggttaggcgttttgcgctgcttcgcgatgtacgggccagatatacgcgttgacattgattattgactagttattaatagtaatcaattacggggtcattagttcatagcccatatatggagttccgcgttacataacttacggtaaatggcccgcctggctgaccgcccaacgacccccgcccattgacgtcaataatgacgtatgttcccatagtaacgccaatagggactttccattgacgtcaatgggtggagtatttacggtaaactgcccacttggcagtacatcaagtgtatc

SEQ ID NO: 13 - DNA, 5514 bp, Unknown
  Description of Unknown: BE4 sequence
atgagctcagagactggcccagtggctgtggaccccacattgagacggcggatcgagccccatgagtttgaggtattcttcgatccgagagagctccgcaaggagacctgcctgctttacgaaattaattgggggggccggcactccatttggcgacatacatcacagaacactaacaagcacgtcgaagtcaacttcatcgagaagttcacgacagaaagatatttctgtccgaacacaaggtgcagcattacctggtttctcagctggagcccatgcggcgaatgtagtagggccatcactgaattcctgtcaaggtatccccacgtcactctgtttatttacatcgcaaggctgtaccaccacgctgacccccgcaatcgacaaggcctgcgggatttgatctcttcaggtgtgactatccaaattatgactgagcaggagtcaggatactgctggagaaactttgtgaattatagcccgagtaatgaagcccactggcctaggtatccccatctgtgggtacgactgtacgttcttgaactgtactgcatcatactgggcctgcctccttgtctcaacattctgagaaggaagcagccacagctgacattctttaccatcgctcttcagtcttgtcattaccagcgactgcccccacacattctctgggccaccgggttgaaatctggtggttcttctggtggttctagcggcagcgagactcccgggacctcagagtccgccacacccgaaagttctggtggttcttctggtggttctgataaaaagtattctattggtttagccatcggcactaattccgttggatgggctgtcataaccgatgaatacaaagtaccttcaaagaaatttaaggtgttggggaacacagaccgtcattcgattaaaaagaatcttatcggtgccctcctattcgatagtggcgaaacggcagaggcgactcgcctgaaacgaaccgctcggagaaggtatacacgtcgcaagaaccgaatatgttacttacaagaaatttttagcaatgagatggccaaagttgacgattctttctttcaccgtttggaagagtccttccttgtcgaagaggacaagaaacatgaacggcaccccatctttggaaacatagtagatgaggtggcatatcatgaaaagtacccaacgatttatcacctcagaaaaaagctagttgactcaactgataaagcggacctgaggttaatctacttggctcttgcccatatgataaagttccgtgggcactttctcattgagggtgatctaaatccggacaactcggatgtcgacaaactgttcatccagttagtacaaacctataatcagttgtttgaagagaaccctataaatgcaagtggcgtggatgcgaaggctattcttagcgcccgcctctctaaatcccgacggctagaaaacctgatcgcacaattacccggagagaagaaaaatgggttgttcggtaaccttatagcgctctcactaggcctgacaccaaattttaagtcgaacttcgacttagctgaagatgccaaattgcagcttagtaaggacacgtacgatgacgatctcgacaatctactggcacaaattggagatcagtatgcggacttatttttggctgccaaaaaccttagcgatgcaatcctcctatctgacatactgagagttaatactgagattaccaaggcgccgttatccgcttcaatgatcaaaaggtacgatgaacatcaccaagacttgacacttctcaaggccctagtccgtcagcaactgcctgagaaatataaggaaatattctttgatcagtcgaaaaacgggtacgcaggttatattgacggcggagcgagtcaagaggaattctacaagtttatcaaacccatattagagaagatggatgggacggaagagttgcttgtaaaactcaatcgcgaagatctactgcgaaagcagcggactttcgacaacggtagcattccacatcaaatccacttaggcgaattgcatgctatacttagaaggcaggaggatttttatccgttcctcaaagacaatcgtgaaaagattgagaaaatcctaacctttcgcataccttactatgtgggacccctggcccgagggaactctcggttcgcatggatgacaagaaagtccgaagaaacgattactccatggaattttgaggaagttgtcgataaaggtgcgtcagctcaatcgttcatcgagaggatgaccaactttgacaagaatttaccgaacgaaaaagtattgcctaagcacagtttactttacgagtatttcacagtgtacaatgaactcacgaaagttaagtatgtcactgagggcatgcgtaaacccgcctttctaagcggagaacagaagaaagcaatagtagatctgttattcaagaccaaccgcaaagtgacagttaagcaattgaaagaggactactttaagaaaattgaatgcttcgattctgtcgagatctccggggtagaagatcgatttaatgcgtcacttggtacgtatcatgacctcctaaagataattaaagataaggacttcctggataacgaagagaatgaagatatcttagaagatatagtgttgactcttaccctctttgaagatcgggaaatgattgaggaaagactaaaaacatacgctcacctgttcgacgataaggttatgaaacagttaaagaggcgtcgctatacgggctggggacgattgtcgcggaaacttatcaacgggataagagacaagcaaagtggtaaaactattctcgattttctaaagagcgacggcttcgccaataggaactttatgcagctgatccatgatgactctttaaccttcaaagaggatatacaaaaggcacaggtttccggacaaggggactcattgcacgaacatattgcgaatcttgctggttcgccagccatcaaaaagggcatactccagacagtcaaagtagtggatgagctagttaaggtcatgggacgtcacaaaccggaaaacattgtaatcgagatggcacgcgaaaatcaaacgactcagaaggggcaaaaaaacagtcgagagcggatgaagagaatagaagagggtattaaagaactgggcagccagatcttaaaggagcatcctgtggaaaatacccaattgcagaacgagaaactttacctctattacctacaaaatggaagggacatgtatgttgatcaggaactggacataaaccgtttatctgattacgacgtcgatcacattgtaccccaatcctttttgaaggacgattcaatcgacaataaagtgcttacacgctcggataagaaccgagggaaaagtgacaatgttccaagcgaggaagtcgtaaagaaaatgaagaactattggcggcagctcctaaatgcgaaactgataacgcaaagaaagttcgataacttaactaaagctgagaggggtggcttgtctgaacttgacaaggccggatttattaaacgtcagctcgtggaaacccgccaaatcacaaagcatgttgcacagatactagattcccgaatgaatacgaaatacgacgagaacgataagctgattcgggaagtcaaagtaatcactttaaagtcaaaattggtgtcggacttcagaaaggattttcaattctataaagttagggagataaataactaccaccatgcgcacgacgcttatcttaatgccgtcgtagggaccgcactcattaagaaatacccgaagctagaaagtgagtttgtgtatggtgattacaaagtttatgacgtccgtaagatgatcgcgaaaagcgaacaggagataggcaaggctacagccaaatacttcttttattctaacattatgaatttctttaagacggaaatcactctggcaaacggagagatacgcaaacgacctttaattgaaaccaatggggagacaggtgaaatcgtatgggataagggccgggacttcgcgacggtgagaaaagttttgtccatgccccaagtcaacatagtaaagaaaactgaggtgcagaccggagggttttcaaaggaatcgattcttccaaaaaggaatagtgataagctcatcgctcgtaaaaaggactgggacccgaaaaagtacggtggcttcgatagccctacagttgcctattctgtcctagtagtggcaaaagttgagaagggaaaatccaagaaactgaagtcagtcaaagaattattggggataacgattatggagcgctcgtcttttgaaaagaaccccatcgacttccttgaggcgaaaggttacaaggaagtaaaaaaggatctcataattaaactaccaaagtatagtctgtttgagttagaaaatggccgaaaacggatgttggctagcgccggagagcttcaaaaggggaacgaactcgcactaccgtctaaatacgtgaatttcctgtatttagcgtcccattacgagaagttgaaaggttcacctgaagataacgaacagaagcaactttttgttgagcagcacaaacattatctcgacgaaatcatagagcaaatttcggaattcagtaagagagtcatcctagctgatgccaatctggacaaagtattaagcgcatacaacaagcacagggataaacccatacgtgagcaggcggaaaatattatccatttgtttactcttaccaacctcggcgctccagccgcattcaagtattttgacacaacgatagatcgcaaacgatacacttctaccaaggaggtgctagacgcgacactgattcaccaatccatcacgggattatatgaaactcggatagatttgtcacagcttgggggtgactctggtggttctggaggatctggtggttctactaatctgtcagatattattgaaaaggagaccggtaagcaactggttatccaggaatccatcctcatgctcccagaggaggtggaagaagtcattgggaacaagccggaaagcgatatactcgtgcacaccgcctacgacgagagcaccgacgagaatgtcatgcttctgactagcgacgcccctgaatacaagccttgggctctggtcatacaggatagcaacggtgagaacaagattaagatgctctctggtggttctggaggatctggtggttctactaatctgtcagatattattgaaaaggagaccggtaagcaactggttatccaggaatccatcctcatgctcccagaggaggtggaagaagtcattgggaacaagccggaaagcgatatactcgtgcacaccgcctacgacgagagcaccgacgagaatgtcatgcttctgactagcgacgcccctgaatacaagccttgggctctggtcatacaggatagcaacggtgagaacaagattaagatgctctctggtggttctaaaaggacggcggacggatcagagttcgagagtccgaaaaaaaaacgaaaggtcgaataa

SEQ ID NO: 14 - DNA, 5514 bp, Artificial Sequence
  Description of Artificial Sequence: Synthetic polynucleotide
atgtcatccgaaaccgggccagtggccgtagacccaacactcaggaggcggatagaaccccatgagtttgaagtgttcttcgaccccagagagctgcgcaaagagacttgcctcctgtatgaaataaattgggggggtcgccattcaatttggaggcacactagccagaatactaacaaacacgtggaggtaaattttatcgagaagtttaccaccgaaagatacttttgccccaatacacggtgttcaattacctggtttctgtcatggagtccatgtggagaatgtagtagagcgataactgagttcctgtctcgatatcctcacgtcacgttgtttatatacatcgctcggctttatcaccatgcggacccgcggaacaggcaaggtcttcgggacctcatatcctctggggtgaccatccagataatgacggagcaagagagcggatactgctggcgaaactttgttaactacagcccaagcaatgaggcacactggcctagatatccgcatctctgggttcgactgtatgtccttgaactgtactgcataattctgggacttccgccatgcttgaacattctgcggcggaaacaaccacagctgacctttttcacgattgctctccaaagttgtcactaccagcgattgccaccccacatcttgtgggctactggactcaagtctggaggaagttcaggcggaagcagcgggtctgaaacgcccggaacctcagagagcgcaacgcccgaaagctctggagggtcaagtggtggtagtgataagaaatactccatcggcctcgccatcggtacgaattctgtcggttgggccgttatcaccgatgagtacaaggtcccttctaagaaattcaaggttttgggcaatacagaccgccattctataaaaaaaaacctgatcggcgcccttttgtttgacagtggtgagactgctgaagcgactcgcctgaagcgaactgccaggaggcggtatacgaggcgaaaaaaccgaatttgttacctccaggagattttctcaaatgaaatggccaaggtagatgatagtttttttcaccgcttggaagaaagttttctcgttgaggaggacaaaaagcacgagaggcacccaatctttggcaacatagtcgatgaggtcgcataccatgagaaatatcctacgatctatcatctccgcaagaagctggtcgatagcacggataaagctgacctccggctgatctaccttgctcttgctcacatgattaaattcaggggccatttcctgatagaaggagacctcaatcccgacaattctgatgtcgacaaactgtttattcagctcgttcagacctataatcaactctttgaggagaaccccatcaatgcttcaggggtggacgcaaaggccattttgtccgcgcgcttgagtaaatcacgacgcctcgagaatttgatagctcaactgccgggtgagaagaaaaacgggttgtttgggaatctcatagcgttgagtttgggacttacgccaaactttaagtctaactttgatttggccgaagatgccaaattgcagctgtccaaagatacctatgatgacgacttggataaccttcttgcgcagattggtgaccaatacgcggatctgtttcttgccgcaaaaaatctgtccgacgccatactcttgtccgatatactgcgcgtcaatactgagataactaaggctcccctcagcgcgtccatgattaaaagatacgatgagcaccaccaagatctcactctgttgaaagccctggttcgccagcagcttccagagaagtataaggagatatttttcgaccaatctaaaaacggctatgcgggttacattgacggtggcgcctctcaagaagaattctacaagtttataaagccgatacttgagaaaatggacggtacagaggaattgttggttaagctcaatcgcgaggacttgttgagaaagcagcgcacatttgacaatggtagtattccacaccagattcatctgggcgagttgcatgccattcttagaagacaagaagatttttatccgtttctgaaagataacagagaaaagattgaaaagatacttacctttcgcataccgtattatgtaggtcccctggctagagggaacagtcgcttcgcttggatgactcgaaaatcagaagaaacaataaccccctggaattttgaagaagtggtagataaaggtgcgagtgcccaatcttttattgagcggatgacaaattttgacaagaatctgcctaacgaaaaggtgcttcccaagcattcccttttgtatgaatactttacagtatataatgaactgactaaagtgaagtacgttaccgaggggatgcgaaagccagcttttctcagtggcgagcagaaaaaagcaatagttgacctgctgttcaagacgaataggaaggttaccgtcaaacagctcaaagaagattactttaaaaagatcgaatgttttgattcagttgagataagcggagtagaggatagatttaacgcaagtcttggaacttatcatgaccttttgaagatcatcaaggataaagattttttggacaacgaggagaatgaagatatcctggaagatatagtacttaccttgacgctttttgaagatcgagagatgatcgaggagcgacttaagacgtacgcacatctctttgacgataaggttatgaaacaattgaaacgccggcggtatactggctggggcaggctttctcgaaagctgattaatggtatccgcgataagcagtctggaaagacaatccttgactttctgaaaagtgatggatttgcaaatagaaactttatgcagcttatacatgatgactctttgacgttcaaggaagacatccagaaggcacaggtatccggccaaggggatagcctccatgaacacatagccaacctggccggctcaccagctattaaaaagggaatattgcaaaccgttaaggttgttgacgaactcgttaaggttatgggccgacacaaaccagagaatatcgtgattgagatggctagggagaatcagaccactcaaaaaggtcagaaaaattctcgcgaaaggatgaagcgaattgaagagggaatcaaagaacttggctctcaaattttgaaagagcacccggtagaaaacactcagctgcagaatgaaaagctgtatctgtattatctgcagaatggtcgagatatgtacgttgatcaggagctggatatcaataggctcagtgactacgatgtcgaccacatcgttcctcaatctttcctgaaagatgactctatcgacaacaaagtgttgacgcgatcagataagaaccggggaaaatccgacaatgtaccctcagaagaagttgtcaagaagatgaaaaactattggagacaattgctgaacgccaagctcataacacaacgcaagttcgataacttgacgaaagccgaaagaggtgggttgtcagaattggacaaagctggctttattaagcgccaattggtggagacccggcagattacgaaacacgtagcacaaattttggattcacgaatgaataccaaatacgacgaaaacgacaaattgatacgcgaggtgaaagtgattacgcttaagagtaagttggtttccgatttcaggaaggattttcagttttacaaagtaagagaaataaacaactaccaccacgcccatgatgcttacctcaacgcggtagttggcacagctcttatcaaaaaatatccaaagctggaaagcgagttcgtttacggtgactataaagtatacgacgttcggaagatgatagccaaatcagagcaggaaattgggaaggcaaccgcaaaatacttcttctattcaaacatcatgaacttctttaagacggagattacgctcgcgaacggcgaaatacgcaagaggcccctcatagagactaacggcgaaaccggggagatcgtatgggacaaaggacgggactttgcgaccgttagaaaagtactttcaatgccacaagtgaatattgttaaaaagacagaagtacaaacaggggggttcagtaaggaatccattttgcccaagcggaacagtgataaattgatagcaaggaaaaaagattgggaccctaagaagtacggtggtttcgactctcctaccgttgcatattcagtccttgtagttgcgaaagtggaaaaggggaaaagtaagaagcttaagagtgttaaagagcttctgggcataaccataatggaacggtctagcttcgagaaaaatccaattgactttctcgaggctaaaggttacaaggaggtaaaaaaggacctgataattaaactcccaaagtacagtctcttcgagttggagaatgggaggaagagaatgttggcatctgcaggggagctccaaaaggggaacgagctggctctgccttcaaaatacgtgaactttctgtacctggccagccactacgagaaactcaagggttctcctgaggataacgagcagaaacagctgtttgtagagcagcacaagcattacctggacgagataattgagcaaattagtgagttctcaaaaagagtaatccttgcagacgcgaatctggataaagttctttccgcctataataagcaccgggacaagcctatacgagaacaagccgagaacatcattcacctctttacccttactaatctgggcgcgccggccgccttcaaatacttcgacaccacgatagacaggaaaaggtatacgagtaccaaagaagtacttgacgccactctcatccaccagtctataacagggttgtacgaaacgaggatagatttgtcccagctcggcggcgactcaggagggtcaggcggctccggtggatcaacgaatctttccgacataatcgagaaagaaaccggcaaacagttggtgatccaagaatcaatcctgatgctgcctgaagaagtagaagaggtgattggcaacaaacctgagtctgacattcttgtccacaccgcgtatgacgagagcacggacgagaacgttatgcttctcactagcgacgcccctgagtataaaccatgggcgctggtcatccaagattccaatggggaaaacaagattaagatgcttagtggtgggtctggagggagcggtgggtccacgaacctcagcgacattattgaaaaagagactggtaaacaacttgtaatacaagagtctattctgatgttgcctgaagaggtggaggaggtgattgggaacaaaccggagtctgatatacttgttcataccgcctatgacgaatctactgatgagaatgtgatgcttttaacgtcagacgctcccgagtacaaaccctgggctctggtgattcaggacagcaatggtgagaataagattaaaatgttgagtgggggctcaaagcgcacggctgacggtagcgaatttgagagccccaaaaaaaaacgaaaggtcgaataa

SEQ ID NO: 15 - DNA, 5514 bp, Artificial Sequence
  Description of Artificial Sequence: Synthetic polynucleotide
atgagcagcgagacaggccctgtggctgtggatcctacactgcggagaagaatcgagccccacgagttcgaggtgttcttcgaccccagagagctgcggaaagagacatgcctgctgtacgagatcaactggggcggcagacactctatctggcggcacacaagccagaacaccaacaagcacgtggaagtgaactttatcgagaagtttacgaccgagcggtacttctgccccaacaccagatgcagcatcacctggtttctgagctggtccccttgcggcgagtgcagcagagccatcaccgagtttctgtccagatatccccacgtgaccctgttcatctatatcgcccggctgtaccaccacgccgatcctagaaatagacagggactgcgcgacctgatcagcagcggagtgaccatccagatcatgaccgagcaagagagcggctactgctggcggaacttcgtgaactacagccccagcaacgaagcccactggcctagatatcctcacctgtgggtccgactgtacgtgctggaactgtactgcatcatcctgggcctgcctccatgcctgaacatcctgagaagaaagcagcctcagctgaccttcttcacaatcgccctgcagagctgccactaccagagactgcctccacacatcctgtgggccaccggacttaagagcggaggatctagcggcggctctagcggatctgagacacctggcacaagcgagtctgccacacctgagagtagcggcggatcttctggcggctccgacaagaagtactctatcggactggccatcggcaccaactctgttggatgggccgtgatcaccgacgagtacaaggtgcccagcaagaaattcaaggtgctgggcaacaccgaccggcacagcatcaagaagaatctgatcggcgccctgctgttcgactctggcgaaacagccgaagccaccagactgaagagaaccgccaggcggagatacacccggcggaagaaccggatctgctacctgcaagagatcttcagcaacgagatggccaaggtggacgacagcttcttccacagactggaagagtccttcctggtggaagaggacaagaagcacgagcggcaccccatcttcggcaacatcgtggatgaggtggcctaccacgagaagtaccccaccatctaccacctgagaaagaaactggtggacagcaccgacaaggccgacctgagactgatctacctggctctggcccacatgatcaagttccggggccactttctgatcgagggcgatctgaaccccgacaacagcgacgtggacaagctgttcatccagctggtgcagacctacaaccagctgttcgaggaaaaccccatcaacgcctctggcgtggacgccaaggctatcctgtctgccagactgagcaagagcagaaggctggaaaacctgatcgcccagctgcctggcgagaagaagaatggcctgttcggcaacctgattgccctgagcctgggactgacccctaacttcaagagcaacttcgacctggccgaggatgccaaactgcagctgagcaaggacacctacgacgacgacctggacaatctgctggcccagatcggcgatcagtacgccgacttgtttctggccgccaagaacctgtccgacgccatcctgctgagcgatatcctgagagtgaacaccgagatcacaaaggcccctctgagcgcctctatgatcaagagatacgacgagcaccaccaggatctgaccctgctgaaggccctcgttagacagcagctgccagagaagtacaaagagattttcttcgatcagtccaagaacggctacgccggctacattgatggcggagccagccaagaggaattctacaagttcatcaagcccatcctggaaaagatggacggcaccgaggaactgctggtcaagctgaacagagaggacctgctgcggaagcagcggaccttcgacaatggctctatccctcaccagatccacctgggagagctgcacgccattctgcggagacaagaggacttttacccattcctgaaggacaaccgggaaaagatcgagaagatcctgaccttcaggatcccctactacgtgggaccactggccagaggcaatagcagattcgcctggatgaccagaaagagcgaggaaaccatcacaccctggaacttcgaggaagtggtggacaagggcgccagcgctcagtccttcatcgagcggatgaccaacttcgataagaacctgcctaacgagaaggtgctgcccaagcactccctgctgtatgagtacttcaccgtgtacaacgagctgaccaaagtgaaatacgtgaccgagggaatgagaaagcccgcctttctgagcggcgagcagaaaaaggccattgtggatctgctgttcaagaccaaccggaaagtgaccgtgaagcagctgaaagaggactacttcaagaaaatcgagtgcttcgacagcgtggaaatcagcggcgtggaagatcggttcaatgccagcctgggcacataccacgacctgctgaaaattatcaaggacaaggacttcctggacaacgaagagaacgaggacattctcgaggacatcgtgctgaccctgacactgtttgaggacagagagatgatcgaggaacggctgaaaacatacgcccacctgttcgacgacaaagtgatgaagcaactgaagcggaggcggtacacaggctggggcagactgtctcggaagctgatcaacggcatccgggataagcagtccggcaagacaatcctggatttcctgaagtccgacggcttcgccaacagaaacttcatgcagctgatccacgacgacagcctgacctttaaagaggacatccagaaagcccaggtgtccggccaaggcgattctctgcacgagcacattgccaacctggccggatctcccgccattaagaagggcatcctgcagacagtgaaggtggtggacgagcttgtgaaagtgatgggcagacacaagcccgagaacatcgtgatcgaaatggccagagagaaccagaccacacagaagggccagaagaacagccgcgagagaatgaagcggatcgaagagggcatcaaagagctgggcagccagatcctgaaagaacaccccgtggaaaacacccagctgcagaacgagaagctgtacctgtactacctgcagaatggacgggatatgtacgtggaccaagagctggacatcaaccggctgagcgactacgatgtggaccatatcgtgccccagagctttctgaaggacgactccatcgataacaaggtcctgaccagaagcgacaagaaccggggcaagagcgataacgtgccctccgaagaggtggtcaagaagatgaagaactactggcgacagctgctgaacgccaagctgattacccagcggaagttcgataacctgaccaaggccgagagaggcggcctgagcgaacttgataaggccggcttcattaagcggcagctggtggaaacccggcagatcaccaaacacgtggcacagattctggactcccggatgaacactaagtacgacgagaatgacaagctgatccgggaagtgaaagtcatcaccctgaagtctaagctggtgtccgatttccggaaggatttccagttctacaaagtgcgggaaatcaacaactaccatcacgcccacgacgcctacctgaatgccgttgttggaacagccctgatcaagaagtatcccaagctggaaagcgagttcgtgtacggcgactacaaggtgtacgacgtgcggaagatgatcgccaagagcgaacaagagatcggcaaggctaccgccaagtactttttctacagcaacatcatgaactttttcaagacagagatcaccctggccaacggcgagatccggaaaagacccctgatcgagacaaacggcgaaaccggggagatcgtgtgggataagggcagagattttgccacagtgcggaaagtgctgagcatgccccaagtgaatatcgtgaagaaaaccgaggtgcagacaggcggcttcagcaaagagtctatcctgcctaagcggaacagcgataagctgatcgccagaaagaaggactgggaccctaagaagtacggcggcttcgatagccctaccgtggcctattctgtgctggtggtggccaaagtggaaaagggcaagtccaaaaagctcaagagcgtgaaagagctgctggggatcaccatcatggaaagaagcagctttgagaagaacccgatcgactttctggaagccaagggctacaaagaagtcaagaaggacctcatcatcaagctccccaagtacagcctgttcgagctggaaaatggccggaagcggatgctggcctcagcaggcgaactgcagaaaggcaatgaactggccctgcctagcaaatacgtcaacttcctgtacctggccagccactatgagaagctgaagggcagccccgaggacaatgagcaaaagcagctgtttgtggaacagcacaagcactacctggacgagatcatcgagcagatcagcgagttctccaagagagtgatcctggccgacgctaacctggataaggtgctgtctgcctataacaagcaccgggacaagcctatcagagagcaggccgagaatatcatccacctgtttaccctgaccaacctgggagcccctgccgccttcaagtacttcgacaccaccatcgaccggaagaggtacaccagcaccaaagaggtgctggacgccacactgatccaccagtctatcaccggcctgtacgaaacccggatcgacctgtctcagctcggcggcgattctggtggttctggcggaagtggcggatccaccaatctgagcgacatcatcgaaaaagagacaggcaagcagctcgtgatccaagaatccatcctgatgctgcctgaagaggttgaggaagtgatcggcaacaagcctgagtccgacatcctggtgcacaccgcctacgatgagagcaccgatgagaacgtcatgctgctgacaagcgacgcccctgagtacaagccttgggctctcgtgattcaggacagcaatggggagaacaagatcaagatgctgagcggaggtagcggaggcagtggcggaagcacaaacctgtctgatatcattgaaaaagaaaccgggaagcaactggtcattcaagagtccattctcatgctcccggaagaagtcgaggaagtcattggaaacaaacccgagagcgatattctggtccacacagcctatgacgagtctacagacgaaaacgtgatgctcctgacctctgacgctcccgagtataagccctgggcacttgttatccaggactctaacggggaaaacaaaatcaaaatgttgtccggcggcagcaagcggacagccgatggatctgagttcgagagccccaagaagaaacggaaggtggagtaa

SEQ ID NO: 16 - protein, 16 aa, Artificial Sequence
  Description of Artificial Sequence: Synthetic peptide
SGSETPGTSESATPES

SEQ ID NO: 17 - protein, 4 aa, Artificial Sequence
  Description of Artificial Sequence: Synthetic peptide
SGGS

SEQ ID NO: 18 - protein, 120 aa, Artificial Sequence
  Description of Artificial Sequence: Synthetic polypeptide
  MISC_FEATURE (1)..(120): This sequence may encompass 1-30 "Ser Gly Gly Ser" repeating units
SGGSSGGSSGGSSGGSSGGSSGGSSGGSSGGSSGGSSGGSSGGSSGGSSGGSSGGSSGGSSGGSSGGSSGGSSGGSSGGSSGGSSGGSSGGSSGGSSGGSSGGSSGGSSGGSSGGSSGGS

SEQ ID NO: 19 - protein, 120 aa, Artificial Sequence
  Description of Artificial Sequence: Synthetic polypeptide
  MISC_FEATURE (1)..(120): This sequence may encompass 1-30 "Gly Gly Gly Ser" repeating units
GGGSGGGSGGGSGGGSGGGSGGGSGGGSGGGSGGGSGGGSGGGSGGGSGGGSGGGSGGGSGGGSGGGSGGGSGGGSGGGSGGGSGGGSGGGSGGGSGGGSGGGSGGGSGGGSGGGSGGGS

SEQ ID NO: 20 - protein, 150 aa, Artificial Sequence
  Description of Artificial Sequence: Synthetic polypeptide
  MISC_FEATURE (1)..(150): This sequence may encompass 1-30 "Gly Gly Gly Gly Ser" repeating units
GGGGSGGGGSGGGGSGGGGSGGGGSGGGGSGGGGSGGGGSGGGGSGGGGSGGGGSGGGGSGGGGSGGGGSGGGGSGGGGSGGGGSGGGGSGGGGSGGGGSGGGGSGGGGSGGGGSGGGGSGGGGSGGGGSGGGGSGGGGSGGGGSGGGGS

SEQ ID NO: 21 - protein, 30 aa, Artificial Sequence
  Description of Artificial Sequence: Synthetic polypeptide
  MISC_FEATURE (1)..(30): This sequence may encompass 1-30 residues
GGGGGGGGGGGGGGGGGGGGGGGGGGGGGG

SEQ ID NO: 22 - protein, 150 aa, Artificial Sequence
  Description of Artificial Sequence: Synthetic polypeptide
  MISC_FEATURE (1)..(150): This sequence may encompass 1-30 "Glu Ala Ala Ala Lys" repeating units
EAAAKEAAAKEAAAKEAAAKEAAAKEAAAKEAAAKEAAAKEAAAKEAAAKEAAAKEAAAKEAAAKEAAAKEAAAKEAAAKEAAAKEAAAKEAAAKEAAAKEAAAKEAAAKEAAAKEAAAKEAAAKEAAAKEAAAKEAAAKEAAAKEAAAK

SEQ ID NO: 23 - protein, 90 aa, Artificial Sequence
  Description of Artificial Sequence: Synthetic polypeptide
  MISC_FEATURE (1)..(90): This sequence may encompass 1-30 "Gly Gly Ser" repeating units
GGSGGSGGSGGSGGSGGSGGSGGSGGSGGSGGSGGSGGSGGSGGSGGSGGSGGSGGSGGSGGSGGSGGSGGSGGSGGSGGSGGSGGSGGS

SEQ ID NO: 24 - protein, 60 aa, Artificial Sequence
  Description of Artificial Sequence: Synthetic polypeptide
  MOD_RES (1)..(1): Any amino acid
  MOD_RES (3)..(3): Any amino acid
  MOD_RES (5)..(5): Any amino acid
  MOD_RES (7)..(7): Any amino acid
  MOD_RES (9)..(9): Any amino acid
  MOD_RES (11)..(11): Any amino acid
  MOD_RES (13)..(13): Any amino acid
  MOD_RES (15)..(15): Any amino acid
  MOD_RES (17)..(17): Any amino acid
  MOD_RES (19)..(19): Any amino acid
  MOD_RES (21)..(21): Any amino acid
  MOD_RES (23)..(23): Any amino acid
  MOD_RES (25)..(25): Any amino acid
  MOD_RES (27)..(27): Any amino acid
  MOD_RES (29)..(29): Any amino acid
  MOD_RES (31)..(31): Any amino acid
  MOD_RES (33)..(33): Any amino acid
  MOD_RES (35)..(35): Any amino acid
  MOD_RES (37)..(37): Any amino acid
  MOD_RES (39)..(39): Any amino acid
  MOD_RES (41)..(41): Any amino acid
  MOD_RES (43)..(43): Any amino acid
  MOD_RES (45)..(45): Any amino acid
  MOD_RES (47)..(47): Any amino acid
  MOD_RES (49)..(49): Any amino acid
  MOD_RES (51)..(51): Any amino acid
  MOD_RES (53)..(53): Any amino acid
  MOD_RES (55)..(55): Any amino acid
  MOD_RES (57)..(57): Any amino acid
  MOD_RES (59)..(59): Any amino acid
  MISC_FEATURE (1)..(60): This sequence may encompass 1-30 "Xaa Pro" repeating units
XPXPXPXPXPXPXPXPXPXPXPXPXPXPXPXPXPXPXPXPXPXPXPXPXPXPXPXPXPXP

SEQ ID NO: 25 - protein, 5 aa, Artificial Sequence
  Description of Artificial Sequence: Synthetic peptide
PAPAP

SEQ ID NO: 26 - protein, 6 aa, Artificial Sequence
  Description of Artificial Sequence: Synthetic peptide
PAPAPA

SEQ ID NO: 27 - protein, 7 aa, Artificial Sequence
  Description of Artificial Sequence: Synthetic peptide
PAPAPAP

SEQ ID NO: 28 - protein, 8 aa, Artificial Sequence
  Description of Artificial Sequence: Synthetic peptide
PAPAPAPA

SEQ ID NO: 29 - protein, 9 aa, Artificial Sequence
  Description of Artificial Sequence: Synthetic peptide
PAPAPAPAP

SEQ ID NO: 30 - protein, 15 aa, Artificial Sequence
  Description of Artificial Sequence: Synthetic peptide
PAPAPAPAPAPAPAP

SEQ ID NO: 31 - protein, 21 aa, Artificial Sequence
  Description of Artificial Sequence: Synthetic peptide
PAPAPAPAPAPAPAPAPAPAP

SEQ ID NO: 32 - protein, 24 aa, Artificial Sequence
  Description of Artificial Sequence: Synthetic peptide
SGGSSGSETPGTSESATPESSGGS

SEQ ID NO: 33 - protein, 32 aa, Artificial Sequence
  Description of Artificial Sequence: Synthetic polypeptide
SGGSSGGSSGSETPGTSESATPESSGGSSGGS

SEQ ID NO: 34 - protein, 104 aa, Artificial Sequence
  Description of Artificial Sequence: Synthetic polypeptide
GGSGGSPGSPAGSPTSTEEGTSESATPESGPGTSTEPSEGSAPGSPAGSPTSTEEGTSTEPSEGSAPGTSTEPSEGSAPGTSESATPESGPGSEPATSGGSGGS

SEQ ID NO: 35 - protein, 24 aa, Artificial Sequence
  Description of Artificial Sequence: Synthetic peptide
SGGSSGGSSGSETPGTSESATPES

SEQ ID NO: 36 - protein, 40 aa, Artificial Sequence
  Description of Artificial Sequence: Synthetic polypeptide
SGGSSGGSSGSETPGTSESATPESSGGSSGGSSGGSSGGS

SEQ ID NO: 37 - protein, 64 aa, Artificial Sequence
  Description of Artificial Sequence: Synthetic polypeptide
SGGSSGGSSGSETPGTSESATPESSGGSSGGSSGGSSGGSSGSETPGTSESATPESSGGSSGGS

SEQ ID NO: 38 - protein, 92 aa, Artificial Sequence
  Description of Artificial Sequence: Synthetic polypeptide
PGSPAGSPTSTEEGTSESATPESGPGTSTEPSEGSAPGSPAGSPTSTEEGTSTEPSEGSAPGTSTEPSEGSAPGTSESATPESGPGSEPATS

SEQ ID NO: 39 - protein, 1785 aa, Unknown; identical to SEQ ID NO: 1
  Description of Unknown: Base editor sequence

SEQ ID NO: 40 - protein, 18 aa, Artificial Sequence
  Description of Artificial Sequence: Synthetic peptide
KRTADGSEFESPKKKRKV

SEQ ID NO: 41 - protein, 16 aa, Artificial Sequence
  Description of Artificial Sequence: Synthetic peptide
KRPAATKKAGQAKKKK

SEQ ID NO: 42 - protein, 17 aa, Artificial Sequence
  Description of Artificial Sequence: Synthetic peptide
KKTELQTTNAENKTKKL

SEQ ID NO: 43 - protein, 19 aa, Artificial Sequence
  Description of Artificial Sequence: Synthetic peptide
KRGINDRNFWRGENGRKTR

SEQ ID NO: 44 - protein, 16 aa, Artificial Sequence
  Description of Artificial Sequence: Synthetic peptide
RKSGKIAAIVVKRPRK

SEQ ID NO: 45 - protein, 7 aa, Artificial Sequence
  Description of Artificial Sequence: Synthetic peptide
PKKKRKV

SEQ ID NO: 46 - protein, 30 aa, Artificial Sequence
  Description of Artificial Sequence: Synthetic polypeptide
MDSLLMNRRKFLYQFKNVRWAKGRRETYLC

SEQ ID NO: 47 - DNA, 3220 bp, Homo sapiens
acaatgactcctttcggtaagtgcagtggaagctgtacactgcccaggcaaagcgtccgggcagcgtaggcgggcgactcagatcccagccagtggacttagcccctgtttgctcctccgataactggggtgaccttggttaatattcaccagcagcctcccccgttgcccctctggatccactgcttaaatacggacgaggacagggccctgtctcctcagcttcaggcaccaccactgacctgggacagtgaatcgacaatgccgtcttctgtctcgtggggcatcctcctgctggcaggcctgtgctgcctggtccctgtctccctggctgaggatccccagggagatgctgcccagaagacagatacatcccaccatgatcaggatcacccaaccttcaacaagatcacccccaacctggctgagttcgccttcagcctataccgccagctggcacaccagtccaacagcaccaatatcttcttctccccagtgagcatcgctacagcctttgcaatgctctccctggggaccaaggctgacactcacgatgaaatcctggagggcctgaatttcaacctcacggagattccggaggctcagatccatgaaggcttccaggaactcctccgtaccctcaaccagccagacagccagctccagctgaccaccggcaatggcctgttcctcagcgagggcctgaagctagtggataagtttttggaggatgttaaaaagttgtaccactcagaagccttcactgtcaacttcggggacaccgaagaggccaagaaacagatcaacgattacgtggagaagggtactcaagggaaaattgtggatttggtcaaggagcttgacagagacacagtttttgctctggtgaattacatcttctttaaaggcaaatgggagagaccctttgaagtcaaggacaccgaggaagaggacttccacgtggaccaggtgaccaccgtgaaggtgcctatgatgaagcgtttaggcatgtttaacatccagcactgtaagaagctgtccagctgggtgctgctgatgaaatacctgggcaatgccaccgccatcttcttcctgcctgatgaggggaaactacagcacctggaaaatgaactcacccacgatatcatcaccaagttcctggaaaatgaagacagaaggtctgccagcttacatttacccaaactgtccattactggaacctatgatctgaagagcgtcctgggtcaactgggcatcactaaggtcttcagcaatggggctgacctctccggggtcacagaggaggcacccctgaagctctccaaggccgtgcataaggctgtgctgaccatcgacgagaaagggactgaagctgctggggccatgtttttagaggccatacccatgtctatcccccccgaggtcaagttcaacaaaccctttgtcttcttaatgattgaacaaaataccaagtctcccctcttcatgggaaaagtggtgaatcccacccaaaaataactgcctctcgctcctcaacccctcccctccatccctggccccctccctggatgacattaaagaagggttgagctggtccctgcctgcatgtgactgtaaatccctcccatgttttctctgagtctccctttgcctgctgaggctgtatgtgggctccaggtaacagtgctgtcttcgggccccctgaactgtgttcatggagcatctggctgggtaggcacatgctgggcttgaatccaggggggactgaatcctcagcttacggacctgggcccatctgtttctggagggctccagtcttccttgtcctgtcttggagtccccaagaaggaatcacaggggaggaaccagataccagccatgaccccaggctccaccaagcatcttcatgtccccctgctcatcccccactcccccccacccagagttgctcatcctgccagggctggctgtgcccaccccaaggctgccctcctgggggccccagaactgcctgatcgtgccgtggcccagttttgtggcatctgcagcaacacaagagagaggacaatgtcctcctcttgacccgctgtcacctaaccagactcgggccctgcacctctcaggcacttctggaaaatgactgaggcagattcttcctgaagcccattctccatggggcaacaaggacacctattctgtccttgtccttccatcgctgccccagaaagcctcacatatctccgtttagaatcaggtcccttctccccagatgaagaggagggtctctgctttgttttctctatctcctcctcagacttgaccaggcccagcaggccccagaagaccattaccctatatcccttctcctccctagtcacatggccataggcctgctgatggctcaggaaggccattgcaaggactcctcagctatgggagaggaagcacatcacccattgacccccgcaacccctccctttcctcctctgagtcccgactggggccacatgcagcctgacttctttgtgcctgttgctgtccctgcagtcttcagagggccaccgcagctccagtgccacggcaggaggctgttcctgaatagcccctgtggtaagggccaggagagtccttccatcctccaaggccctgctaaaggacacagcagccaggaagtcccctgggcccctagctgaaggacagcctgctccctccgtctctaccaggaatggccttgtcctatggaaggcactgccccatcccaaactaatctaggaatcactgtctaaccactcactgtcatgaatgtgtacttaaaggatgaggttgagtcataccaaatagtgatttcgatagttcaaaatggtgaaattagcaattctacatgattcagtctaatcaatggataccgactgtttcccacacaagtctcctgttctcttaagcttactcactgacagcctttcactctccacaaatacattaaagatatggccatcaccaagccccctaggatgacaccagacctgagagtctgaagacctggatccaagttctgacttttccccctgacagctgtgtgaccttcgtgaagtcgccaaacctctctgagccccagtcattgctagtaagacctgcctttgagttggtatgatgttcaagttagataacaaaatgtttatacccattagaacagagaataaatagaactacatttcttgca

SEQ ID NO: 48 - protein, 1368 aa, Artificial Sequence [sequence omitted]

SEQ ID NO: 49 - RNA, 80 nt, Artificial Sequence; identical to SEQ ID NO: 2
  Description of Artificial Sequence: Synthetic oligonucleotide

SEQ ID NO: 50 - protein, 1367 aa, Streptococcus pyogenes
MDKKYSIGLDIGTNSVGWAVITDDYKVPSKKFKVLGNTDRHSIKKNLIGALLFGSGETAEATRLKRTARRRYTRRKNRICYLQEIFSNEMAKVDDSFFHRLEESFLVEEDKKHERHPIFGNIVDEVAYHEKYPTIYHLRKKLADSTDKADLRLIYLALAHMIKFRGHFLIEGDLNPDNSDVDKLFIQLVQIYNQLFEENPINASRVDAKAILSARLSKSRRLENLIAQLPGEKRNGLFGNLIALSLGLTPNFKSNFDLAEDAKLQLSKDTYDDDLDNLLAQIGDQYADLFLAAKNLSDAILLSDILRVNSEITKAPLSASMIKRYDEHHQDLTLLKALVRQQLPEKYKEIFFDQSKNGYAGYIDGGASQEEFYKFIKPILEKMDGTEELLVKLNREDLLRKQRTFDNGSIPHQIHLGELHAILRRQEDFYPFLKDNREKIEKILTFRIPYYVGPLARGNSRFAWMTRKSEETITPWNFEEVVDKGASAQSFIERMTNFDKNLPNEKVLPKHSLLYEYFTVYNELTKVKYVTEGMRKPAFLSGEQKKAIVDLLFKTNRKVTVKQLKEDYFKKIECFDSVEISGVEDRFNASLGAYHDLLKIIKDKDFLDNEENEDILEDIVLTLTLFEDRGMIEERLKTYAHLFDDKVMKQLKRRRYTGWGRLSRKLINGIRDKQSGKTILDFLKSDGFANRNFMQLIHDDSLTFKEDIQKAQVSGQGHSLHEQIANLAGSPAIKKGILQTVKIVDELVKVMGHKPENIVIEMARENQTTQKGQKNSRERMKRIEEGIKELGSQILKEHPVENTQLQNEKLYLYYLQNGRDMYVDQELDINRLSDYDVDHIVPQSFIKDDSIDNKVLTRSDKNRGKSDNVPSEEVVKKMKNYWRQLLNAKLITQRKFDNLTKAERGGLSELDKAGFIKRQLVETRQITKHVAQILDSRMNTKYDENDKLIREVKVITLKSKLVSDFRKDFQFYKVREINNYHHAHDAYLNAVVGTALIKKYPKLESEFVYGDYKVYDVRKMIAKSEQEIGKATAKYFFYSNIMNFFKTEITLANGEIRKRPLIETNGETGEIVWDKGRDFATVRKVLSMPQVNIVKKTEVQTGGFSKESILPKRNSDKLIARKKDWDPKKYGGFDSPTVAYSVLVVAKVEKGKSKKLKSVKELLGITIMERSSFEKNPIDFLEAKGYKEVKKDLIIKLPKYSLFELENGRKRMLASAGELQKGNELALPSKYVNFLYLASHYEKLKGSPEDNEQKQLFVEQHKHYLDEIIEQISEFSKRVILADANLDKVLSAYNKHRDKPIREQAENIIHLFTLTNLGAPAAFKYFDTTIDRKRYTSTKEVLDATLIHQSITGLYETRIDLSQLGGD

SEQ ID NO: 51 - DNA, 4104 bp, Streptococcus pyogenes
atggataagaaatactcaataggcttagatatcggcacaaatagcgtcggatgggcggtgatcactgatgattataaggttccgtctaaaaagttcaaggttctgggaaatacagaccgccacagtatcaaaaaaaatcttataggggctcttttatttggcagtggagagacagcggaagcgactcgtctcaaacggacagctcgtagaaggtatacacgtcggaagaatcgtatttgttatctacaggagattttttcaaatgagatggcgaaagtagatgatagtttctttcatcgacttgaagagtcttttttggtggaagaagacaagaagcatgaacgtcatcctatttttggaaatatagtagatgaagttgcttatcatgagaaatatccaactatctatcatctgcgaaaaaaattggcagattctactgataaagcggatttgcgcttaatctatttggccttagcgcatatgattaagtttcgtggtcattttttgattgagggagatttaaatcctgataatagtgatgtggacaaactatttatccagttggtacaaatctacaatcaattatttgaagaaaaccctattaacgcaagtagagtagatgctaaagcgattctttctgcacgattgagtaaatcaagacgattagaaaatctcattgctcagctccccggtgagaagagaaatggcttgtttgggaatctcattgctttgtcattgggattgacccctaattttaaatcaaattttgatttggcagaagatgctaaattacagctttcaaaagatacttacgatgatgatttagataatttattggcgcaaattggagatcaatatgctgatttgtttttggcagctaagaatttatcagatgctattttactttcagatatcctaagagtaaatagtgaaataactaaggctcccctatcagcttcaatgattaagcgctacgatgaacatcatcaagacttgactcttttaaaagctttagttcgacaacaacttccagaaaagtataaagaaatcttttttgatcaatcaaaaaacggatatgcaggttatattgatgggggagctagccaagaagaattttataaatttatcaaaccaattttagaaaaaatggatggtactgaggaattattggtgaaactaaatcgtgaagatttgctgcgcaagcaacggacctttgacaacggctctattccccatcaaattcacttgggtgagctgcatgctattttgagaagacaagaagacttttatccatttttaaaagacaatcgtgagaagattgaaaaaatcttgacttttcgaattccttattatgttggtccattggcgcgtggcaatagtcgttttgcatggatgactcggaagtctgaagaaacaattaccccatggaattttgaagaagttgtcgataaaggtgcttcagctcaatcatttattgaacgcatgacaaactttgataaaaatcttccaaatgaaaaagtactaccaaaacatagtttgctttatgagtattttacggtttataacgaattgacaaaggtcaaatatgttactgagggaatgcgaaaaccagcatttctttcaggtgaacagaagaaagccattgttgatttactcttcaaaacaaatcgaaaagtaaccgttaagcaattaaaagaagattatttcaaaaaaatagaatgttttgatagtgttgaaatttcaggagttgaagatagatttaatgcttcattaggcgcctaccatgatttgctaaaaattattaaagataaagattttttggataatgaagaaaatgaagatatcttagaggatattgttttaacattgaccttatttgaagatagggggatgattgaggaaagacttaaaacatatgctcacctctttgatgataaggtgatgaaacagcttaaacgtcgccgttatactggttggggacgtttgtctcgaaaattgattaatggtattagggataagcaatctggcaaaacaatattagattttttgaaatcagatggttttgccaatcgcaattttatgcagctgatccatgatgatagtttgacatttaaagaagatattcaaaaagcacaggtgtctggacaaggccatagtttacatgaacagattgctaacttagctggcagtcctgctattaaaaaaggtattttacagactgtaaaaattgttgatgaactggtcaaagtaatggggcataagccagaaaatatcgttattgaaatggcacgtgaaaatcagacaactcaaaagggccagaaaaattcgcgagagcgtatgaaacgaatcgaagaaggtatcaaagaattaggaagtcagattcttaaagagcatcctgttgaaaatactcaattgcaaaatgaaaagctctatctctattatctacaaaatggaagagacatgtatgtggaccaagaattagatattaatcgtttaagtgattatgatgtcgatcacattgttccacaaagtttcattaaagacgattcaatagacaataaggtactaacgcgttctgataaaaatcgtggtaaatcggataacgttccaagtgaagaagtagtcaaaaagatgaaaaactattggagacaacttctaaacgccaagttaatcactcaacgtaagtttgataatttaacgaaagctgaacgtggaggtttgagtgaacttgataaagctggttttatcaaacgccaattggttgaaactcgccaaatcactaagcatgtggcacaaattttggatagtcgcatgaatactaaatacgatgaaaatgataaacttattcgagaggttaaagtgattaccttaaaatctaaattagtttctgacttccgaaaagatttccaattctataaagtacgtgagattaacaattaccatcatgcccatgatgcgtatctaaatgccgtcgttggaactgctttgattaagaaatatccaaaacttgaatcggagtttgtctatggtgattataaagtttatgatgttcgtaaaatgattgctaagtctgagcaagaaataggcaaagcaaccgcaaaatatttcttttactctaatatcatgaacttcttcaaaacagaaattacacttgcaaatggagagattcgcaaacgccctctaatcgaaactaatggggaaactggagaaattgtctgggataaagggcgagattttgccacagtgcgcaaagtattgtccatgccccaagtcaatattgtcaagaaaacagaagtacagacaggcggattctccaaggagtcaattttaccaaaaagaaattcggacaagcttattgctcgtaaaaaagactgggatccaaaaaaatatggtggttttgatagtccaacggtagcttattcagtcctagtggttgctaaggtggaaaaagggaaatcgaagaagttaaaatccgttaaagagttactagggatcacaattatggaaagaagttcctttgaaaaaaatccgattgactttttagaagctaaaggatataaggaagttaaaaaagacttaatcattaaactacctaaatatagtctttttgagttagaaaacggtcgtaaacggatgctggctagtgccggagaattacaaaaaggaaatgagctggctctgccaagcaaatatgtgaattttttatatttagctagtcattatgaaaagttgaagggtagtccagaagataacgaacaaaaacaattgtttgtggagcagcataagcattatttagatgagattattgagcaaatcagtgaattttctaagcgtgttattttagcagatgccaatttagataaagttcttagtgcatataacaaacatagagacaaaccaatacgtgaacaagcagaaaatattattcatttatttacgttgacgaatcttggagctcccgctgcttttaaatattttgatacaacaattgatcgtaaacgatatacgtctacaaaagaagttttagatgccactcttatccatcaatccatcactggtctttatgaaacacgcattgatttgagtcagctaggaggtgactga

SEQ ID NO: 52 - protein, 1367 aa, Streptococcus pyogenes; identical to SEQ ID NO: 50

SEQ ID NO: 53 - DNA, 4212 bp, Streptococcus pyogenes
atggataaaaagtattctattggtttagacatcggcactaattccgttggatgggctgtcataaccgatgaatacaaagtaccttcaaagaaatttaaggtgttggggaacacagaccgtcattcgattaaaaagaatcttatcggtgccctcctattcgatagtggcgaaacggcagaggcgactcgcctgaaacgaaccgctcggagaaggtatacacgtcgcaagaaccgaatatgttacttacaagaaatttttagcaatgagatggccaaagttgacgattctttctttcaccgtttggaagagtccttccttgtcgaagaggacaagaaacatgaacggcaccccatctttggaaacatagtagatgaggtggcatatcatgaaaagtacccaacgatttatcacctcagaaaaaagctagttgactcaactgataaagcggacctgaggttaatctacttggctcttgcccatatgataaagttccgtgggcactttctcattgagggtgatctaaatccggacaactcggatgtcgacaaactgttcatccagttagtacaaacctataatcagttgtttgaagagaaccctataaatgcaagtggcgtggatgcgaaggctattcttagcgcccgcctctctaaatcccgacggctagaaaacctgatcgcacaattacccggagagaagaaaaatgggttgttcggtaaccttatagcgctctcactaggcctgacaccaaattttaagtcgaacttcgacttagctgaagatgccaaattgcagcttagtaaggacacgtacgatgacgatctcgacaatctactggcacaaattggagatcagtatgcggacttatttttggctgccaaaaaccttagcgatgcaatcctcctatctgacatactgagagttaatactgagattaccaaggcgccgttatccgcttcaatgatcaaaaggtacgatgaacatcaccaagacttgacacttctcaaggccctagtccgtcagcaactgcctgagaaatataaggaaatattctttgatcagtcgaaaaacgggtacgcaggttatattgacggcggagcgagtcaagaggaattctacaagtttatcaaacccatattagagaagatggatgggacggaagagttgcttgtaaaactcaatcgcgaagatctactgcgaaagcagcggactttcgacaacggtagcattccacatcaaatccacttaggcgaattgcatgctatacttagaaggcaggaggatttttatccgttcctcaaagacaatcgtgaaaagattgagaaaatcctaacctttcgcataccttactatgtgggacccctggcccgagggaactctcggttcgcatggatgacaagaaagtccgaagaaacgattactccatggaattttgaggaagttgtcgataaaggtgcgtcagctcaatcgttcatcgagaggatgaccaactttgacaagaatttaccgaacgaaaaagtattgcctaagcacagtttactttacgagtatttcacagtgtacaatgaactcacgaaagttaagtatgtcactgagggcatgcgtaaacccgcctttctaagcggagaacagaagaaagcaatagtagatctgttattcaagaccaaccgcaaagtgacagttaagcaattgaaagaggactactttaagaaaattgaatgcttcgattctgtcgagatctccggggtagaagatcgatttaatgcgtcacttggtacgtatcatgacctcctaaagataattaaagataaggacttcctggataacgaagagaatgaagatatcttagaagatatagtgttgactcttaccctctttgaagatcgggaaatgattgaggaaagactaaaaacatacgctcacctgttcgacgataaggttatgaaacagttaaagaggcgtcgctatacgggctggggacgattgtcgcggaaacttatcaacgggataagagacaagcaaagtggtaaaactattctcgattttctaaagagcgacggcttcgccaataggaactttatgcagctgatccatgatgactctttaaccttcaaagaggatatacaaaaggcacaggtttccggacaaggggactcattgcacgaacatattgcgaatcttgctggttcgccagccatcaaaaagggcatactccagacagtcaaagtagtggatgagctagttaaggtcatgggacgtcacaaaccggaaaacattgtaatcgagatggcacgcgaaaatcaaacgactcagaaggggcaaaaaaacagtcgagagcggatgaagagaatagaagagggtattaaagaactgggcagccagatcttaaaggagcatcctgtggaaaatacccaattgcagaacgagaaactttacctctattacctacaaaatggaagggacatgtatgttgatcaggaactggacataaaccgtttatctgattacgacgtcgatcacattgtaccccaatcctttttgaaggacgattcaatcgacaataaagtgcttacacgctcggataagaaccgagggaaaagtgacaatgttccaagcgaggaagtcgtaaagaaaatgaagaactattggcggcagctcctaaatgcgaaactgataacgcaaagaaagttcgataacttaactaaagctgagaggggtggcttgtctgaacttgacaaggccggatttattaaacgtcagctcgtggaaacccgccaaatcacaaagcatgttgcacagatactagattcccgaatgaatacgaaatacgacgagaacgataagctgattcgggaagtcaaagtaatcactttaaagtcaaaattggtgtcggacttcagaaaggattttcaattctataaagttagggagataaataactaccaccatgcgcacgacgcttatcttaatgccgtcgtagggaccgcactcattaagaaatacccgaagctagaaagtgagtttgtgtatggtgattacaaagtttatgacgtccgtaagatgatcgcgaaaagcgaacaggagataggcaaggctacagccaaatacttcttttattctaacattatgaatttctttaagacggaaatcactctggcaaacggagagatacgcaaacgacctttaattgaaaccaatggggagacaggtgaaatcgtatgggataagggccgggacttcgcgacggtgagaaaagttttgtccatgccccaagtcaacatagtaaagaaaactgaggtgcagaccggagggttttcaaaggaatcgattcttccaaaaaggaatagtgataagctcatcgctcgtaaaaaggactgggacccgaaaaagtacggtggcttcgatagccctacagttgcctattctgtcctagtagtggcaaaagttgagaagggaaaatccaagaaactgaagtcagtcaaagaattattggggataacgattatggagcgctcgtcttttgaaaagaaccccatcgacttccttgaggcgaaaggttacaaggaagtaaaaaaggatctcataattaaactaccaaagtatagtctgtttgagttagaaaatggccgaaaacggatgttggctagcgccggagagcttcaaaaggggaacgaactcgcactaccgtctaaatacgtgaatttcctgtatttagcgtcccattacgagaagttgaaaggttcacctgaagataacgaacagaagcaactttttgttgagcagcacaaacattatctcgacgaaatcatagagcaaatttcggaattcagtaagagagtcatcctagctgatgccaatctggacaaagtattaagcgcatacaacaagcacagggataaacccatacgtgagcaggcggaaaatattatccatttgtttactcttaccaacctcggcgctccagccgcattcaagtattttgacacaacgatagatcgcaaacgatacacttctaccaaggaggtgctagacgcgacactgattcaccaatccatcacgggattatatgaaactcggatagatttgtcacagcttgggggtgacggatcccccaagaagaagaggaaagtctcgagcgactacaaagaccatgacggtgattataaagatcatgacatcgattacaaggatgacgatgacaaggctgcagga

SEQ ID NO: 54 - protein, 1368 aa, Streptococcus pyogenes
MDKKYSIGLAIGTNSVGWAVITDEYKVPSKKFKVLGNTDRHSIKKNLIGALLFDSGETAEATRLKRTARRRYTRRKNRICYLQEIFSNEMAKVDDSFFHRLEESFLVEEDKKHERHPIFGNIVDEVAYHEKYPTIYHLRKKLVDSTDKADLRLIYLALAHMIKFRGHFLIEGDLNPDNSDVDKLFIQLVQTYNQLFEENPINASGVDAKAILSARLSKSRRLENLIAQLPGEKKNGLFGNLIALSLGLTPNFKSNFDLAEDAKLQLSKDTYDDDLDNLLAQIGDQYADLFLAAKNLSDAILLSDILRVNTEITKAPLSASMIKRYDEHHQDLTLLKALVRQQLPEKYKEIFFDQSKNGYAGYIDGGASQEEFYKFIKPILEKMDGTEELLVKLNREDLLRKQRTFDNGSIPHQIHLGELHAILRRQEDFYPFLKDNREKIEKILTFRIPYYVGPLARGNSRFAWMTRKSEETITPWNFEEVVDKGASAQSFIERMTNFDKNLPNEKVLPKHSLLYEYFTVYNELTKVKYVTEGMRKPAFLSGEQKKAIVDLLFKTNRKVTVKQLKEDYFKKIECFDSVEISGVEDRFNASLGTYHDLLKIIKDKDFLDNEENEDILEDIVLTLTLFEDREMIEERLKTYAHLFDDKVMKQLKRRRYTGWGRLSRKLINGIRDKQSGKTILDFLKSDGFANRNFMQLIHDDSLTFKEDIQKAQVSGQGDSLHEHIANLAGSPAIKKGILQTVKVVDELVKVMGRHKPENIVIEMARENQTTQKGQKNSRERMKRIEEGIKELGSQILKEHPVENTQLQNEKLYLYYLQNGRDMYVDQELDINRLSDYDVDHIVPQSFLKDDSIDNKVLTRSDKNRGKSDNVPSEEVVKKMKNYWRQLLNAKLITQRKFDNLTKAERGGLSELDKAGFIKRQLVETRQITKHVAQILDSRMNTKYDENDKLIREVKVITLKSKLVSDFRKDFQFYKVREINNYHHAHDAYLNAVVGTALIKKYPKLESEFVYGDYKVYDVRKMIAKSEQEIGKATAKYFFYSNIMNFFKTEITLANGEIRKRPLIETNGETGEIVWDKGRDFATVRKVLSMPQVNIVKKTEVQTGGFSKESILPKRNSDKLIARKKDWDPKKYGGFDSPTVAYSVLVVAKVEKGKSKKLKSVKELLGITIMERSSFEKNPIDFLEAKGYKEVKKDLIIKLPKYSLFELENGRKRMLASAGELQKGNELALPSKYVNFLYLASHYEKLKGSPEDNEQKQLFVEQHKHYLDEIIEQISEFSKRVILADANLDKVLSAYNKHRDKPIREQAENIIHLFTLTNLGAPAAFKYFDTTIDRKRYTSTKEVLDATLIHQSITGLYETRIDLSQLGGD

SEQ ID NO: 55 - DNA, 4107 bp, Streptococcus pyogenes
atggataagaaatactcaataggcttagatatcggcacaaatagcgtcggatgggcggtgatcactgatgaatataaggttccgtctaaaaagttcaaggttctgggaaatacagaccgccacagtatcaaaaaaaatcttataggggctcttttatttgacagtggagagacagcggaagcgactcgtctcaaacggacagctcgtagaaggtatacacgtcggaagaatcgtatttgttatctacaggagattttttcaaatgagatggcgaaagtagatgatagtttctttcatcgacttgaagagtcttttttggtggaagaagacaagaagcatgaacgtcatcctatttttggaaatatagtagatgaagttgcttatcatgagaaatatccaactatctatcatctgcgaaaaaaattggtagattctactgataaagcggatttgcgcttaatctatttggccttagcgcatatgattaagtttcgtggtcattttttgattgagggagatttaaatcctgataatagtgatgtggacaaactatttatccagttggtacaaacctacaatcaattatttgaagaaaaccctattaacgcaagtggagtagatgctaaagcgattctttctgcacgattgagtaaatcaagacgattagaaaatctcattgctcagctccccggtgagaagaaaaatggcttatttgggaatctcattgctttgtcattgggtttgacccctaattttaaatcaaattttgatttggcagaagatgctaaattacagctttcaaaagatacttacgatgatgatttagataatttattggcgcaaattggagatcaatatgctgatttgtttttggcagctaagaatttatcagatgctattttactttcagatatcctaagagtaaatactgaaataactaaggctcccctatcagcttcaatgattaaacgctacgatgaacatcatcaagacttgactcttttaaaagctttagttcgacaacaacttccagaaaagtataaagaaatcttttttgatcaatcaaaaaacggatatgcaggttatattgatgggggagctagccaagaagaattttataaatttatcaaaccaattttagaaaaaatggatggtactgaggaattattggtgaaactaaatcgtgaagatttgctgcgcaagcaacggacctttgacaacggctctattccccatcaaattcacttgggtgagctgcatgctattttgagaagacaagaagacttttatccatttttaaaagacaatcgtgagaagattgaaaaaatcttgacttttcgaattccttattatgttggtccattggcgcgtggcaatagtcgttttgcatggatgactcggaagtctgaagaaacaattaccccatggaattttgaagaagttgtcgataaaggtgcttcagctcaatcatttattgaacgcatgacaaactttgataaaaatcttccaaatgaaaaagtactaccaaaacatagtttgctttatgagtattttacggtttataacgaattgacaaaggtcaaatatgttactgaaggaatgcgaaaaccagcatttctttcaggtgaacagaagaaagccattgttgatttactcttcaaaacaaatcgaaaagtaaccgttaagcaattaaaagaagattatttcaaaaaaatagaatgttttgatagtgttgaaatttcaggagttgaagatagatttaatgcttcattaggtacctaccatgatttgctaaaaattattaaagataaagattttttggataatgaagaaaatgaagatatcttagaggatattgttttaacattgaccttatttgaagatagggagatgattgaggaaagacttaaaacatatgctcacctctttgatgataaggtgatgaaacagcttaaacgtcgccgttatactggttggggacgtttgtctcgaaaattgattaatggtattagggataagcaatctggcaaaacaatattagattttttgaaatcagatggttttgccaatcgcaattttatgcagctgatccatgatgatagtttgacatttaaagaagacattcaaaaagcacaagtgtctggacaaggcgatagtttacatgaacatattgcaaatttagctggtagccctgctattaaaaaaggtattttacagactgtaaaagttgttgatgaattggtcaaagtaatggggcggcataagccagaaaatatcgttattgaaatggcacgtgaaaatcagacaactcaaaagggccagaaaaattcgcgagagcgtatgaaacgaatcgaagaaggtatcaaagaattaggaagtcagattcttaaagagcatcctgttgaaaatactcaattgcaaaatgaaaagctctatctctattatctccaaaatggaagagacatgtatgtggaccaagaattagatattaatcgtttaagtgattatgatgtcgatcacattgttccacaaagtttccttaaagacgattcaatagacaataaggtcttaacgcgttctgataaaaatcgtggtaaatcggataacgttccaagtgaagaagtagtcaaaaagatgaaaaactattggagacaacttctaaacgccaagttaatcactcaacgtaagtttgataatttaacgaaagctgaacgtggaggtttgagtgaacttgataaagctggttttatcaaacgccaattggttgaaactcgccaaatcactaagcatgtggcacaaattttggatagtcgcatgaatactaaatacgatgaaaatgataaacttattcgagaggttaaagtgattaccttaaaatctaaattagtttctgacttccgaaaagatttccaattctataaagtacgtgagattaacaattaccatcatgcccatgatgcgtatctaaatgccgtcgttggaactgctttgattaagaaatatccaaaacttgaatcggagtttgtctatggtgattataaagtttatgatgttcgtaaaatgattgctaagtctgagcaagaaataggcaaagcaaccgcaaaatatttcttttactctaatatcatgaacttcttcaaaacagaaattacacttgcaaatggagagattcgcaaacgccctctaatcgaaactaatggggaaactggagaaattgtctgggataaagggcgagattttgccacagtgcgcaaagtattgtccatgccccaagtcaatattgtcaagaaaacagaagtacagacaggcggattctccaaggagtcaattttaccaaaaagaaattcggacaagcttattgctcgtaaaaaagactgggatccaaaaaaatatggtggttttgatagtccaacggtagcttattcagtcctagtggttgctaaggtggaaaaagggaaatcgaagaagttaaaatccgttaaagagttactagggatcacaattatggaaagaagttcctttgaaaaaaatccgattgactttttagaagctaaaggatataaggaagttaaaaaagacttaatcattaaactacctaaatatagtctttttgagttagaaaacggtcgtaaacggatgctggctagtgccggagaattacaaaaaggaaatgagctggctctgccaagcaaatatgtgaattttttatatttagctagtcattatgaaaagttgaagggtagtccagaagataacgaacaaaaacaattgtttgtggagcagcataagcattatttagatgagattattgagcaaatcagtgaattttctaagcgtgttattttagcagatgccaatttagataaagttcttagtgcatataacaaacatagagacaaaccaatacgtgaacaagcagaaaatattattcatttatttacgttgacgaatcttggagctcccgctgcttttaaatattttgatacaacaattgatcgtaaacgatatacgtctacaaaagaagttttagatgccactcttatccatcaatccatcactggtctttatgaaacacgcattgatttgagtcagctaggaggtgactga

SEQ ID NO: 56 - protein, 1368 aa, Streptococcus pyogenes [sequence omitted]

SEQ ID NO: 57 - protein, 1368 aa, Artificial Sequence
  Description of Artificial Sequence: Synthetic polypeptide
MDKKYSIGLAIGTNSVGWAVITDEYKVPSKKFKVLGNTDRHSIKKNLIGALLFDSGETAEATRLKRTARRRYTRRKNRICYLQEIFSNEMAKVDDSFFHRLEESFLVEEDKKHERHPIFGNIVDEVAYHEKYPTIYHLRKKLVDSTDKADLRLIYLALAHMIKFRGHFLIEGDLNPDNSDVDKLFIQLVQTYNQLFEENPINASGVDAKAILSARLSKSRRLENLIAQLPGEKKNGLFGNLIALSLGLTPNFKSNFDLAEDAKLQLSKDTYDDDLDNLLAQIGDQYADLFLAAKNLSDAILLSDILRVNTEITKAPLSASMIKRYDEHHQDLTLLKALVRQQLPEKYKEIFFDQSKNGYAGYIDGGASQEEFYKFIKPILEKMDGTEELLVKLNREDLLRKQRTFDNGSIPHQIHLGELHAILRRQEDFYPFLKDNREKIEKILTFRIPYYVGPLARGNSRFAWMTRKSEETITPWNFEEVVDKGASAQSFIERMTNFDKNLPNEKVLPKHSLLYEYFTVYNELTKVKYVTEGMRKPAFLSGEQKKAIVDLLFKTNRKVTVKQLKEDYFKKIECFDSVEISGVEDRFNASLGTYHDLLKIIKDKDFLDNEENEDILEDIVLTLTLFEDREMIEERLKTYAHLFDDKVMKQLKRRRYTGWGRLSRKLINGIRDKQSGKTILDFLKSDGFANRNFMQLIHDDSLTFKEDIQKAQVSGQGDSLHEHIANLAGSPAIKKGILQTVKVVDELVKVMGRHKPENIVIEMARENQTTQKGQKNSRERMKRIEEGIKELGSQILKEHPVENTQLQNEKLYLYYLQNGRDMYVDQELDINRLSDYDVDAIVPQSFLKDDSIDNKVLTRSDKNRGKSDNVPSEEVVKKMKNYWRQLLNAKLITQRKFDNLTKAERGGLSELDKAGFIKRQLVETRQITKHVAQILDSRMNTKYDENDKLIREVKVITLKSKLVSDFRKDFQFYKVREINNYHHAHDAYLNAVVGTALIKKYPKLESEFVYGDYKVYDVRKMIAKSEQEIGKATAKYFFYSNIMNFFKTEITLANGEIRKRPLIETNGETGEIVWDKGRDFATVRKVLSMPQVNIVKKTEVQTGGFSKESILPKRNSDKLIARKKDWDPKKYGGFDSPTVAYSVLVVAKVEKGKSKKLKSVKELLGITIMERSSFEKNPIDFLEAKGYKEVKKDLIIKLPKYSLFELENGRKRMLASAGELQKGNELALPSKYVNFLYLASHYEKLKGSPEDNEQKQLFVEQHKHYLDEIIEQISEFSKRVILADANLDKVLSAYNKHRDKPIREQAENIIHLFTLTNLGAPAAFKYFDTTIDRKRYTSTKEVLDATLIHQSITGLYETRIDLSQLGGD

SEQ ID NO: 58 - protein, 1368 aa, Artificial Sequence; identical to SEQ ID NO: 57
  Description of Artificial Sequence: Synthetic polypeptide

SEQ ID NO: 59 - protein, 1368 aa, Artificial Sequence; identical to SEQ ID NO: 54
  Description of Artificial Sequence: Synthetic polypeptide

SEQ ID NO: 60 - protein, 345 aa, Sulfolobus islandicus
MEVPLYNIFGDNYIIQVATEAENSTIYNNKVEIDDEELRNVLNLAYKIAKNNEDAAAERRGKAKKKKGEEGETTTSNIILPLSGNDKNPWTETLKCYNFPTTVALSEVFKNFSQVKECEEVSAPSFVKPEFYEFGRSPGMVERTRRVKLEVEPHYLIIAAAGWVLTRLGKAKVSEGDYVGVNVFTPTRGILYSLIQNVNGIVPGIKPETAFGLWIARKVVSSVTNPNVSVVRIYTISDAVGQNPTTINGGFSIDLTKLLEKRYLLSERLEAIARNALSISSNMRERYIVLANYIYEYLTGSKRLEDLLYFANRDLIMNLNSDDGKVRDLKLISAYVNGELIRGEG

SEQ ID NO: 61 - protein, 345 aa, Sulfolobus islandicus
MEVPLYNIFGDNYIIQVATEAENSTIYNNKVEIDDEELRNVLNLAYKIAKNNEDAAAERRGKAKKKKGEEGETTTSNIILPLSGNDKNPWTETLKCYNFPTTVALSEVFKNFSQVKECEEVSAPSFVKPEFYKFGRSPGMVERTRRVKLEVEPHYLIMAAAGWVLTRLGKAKVSEGDYVGVNVFTPTRGILYSLIQNVNGIVPGIKPETAFGLWIARKVVSSVTNPNVSVVSIYTISDAVGQNPTTINGGFSIDLTKLLEKRDLLSERLEAIARNALSISSNMRERYIVLANYIYEYLTGSKRLEDLLYFANRDLIMNLNSDDGKVRDLKLISAYVNGELIRGEG

SEQ ID NO: 62 - protein, 987 aa, Unknown
  Description of Unknown: Deltaproteobacteria CasX sequence
MEKRINKIRKKLSADNATKPVSRSGPMKTLLVRVMTDDLKKRLEKRRKKPEVMPQVISNNAANNLRMLLDDYTKMKEAILQVYWQEFKDDHVGLMCKFAQPASKKIDQNKLKPEMDEKGNLTTAGFACSQCGQPLFVYKLEQVSEKGKAYTNYFGRCNVAEHEKLILLAQLKPVKDSDEAVTYSLGKFGQRALDFYSIHVTKESTHPVKPLAQIAGNRYASGPVGKALSDACMGTIASFLSKYQDIIIEHQKVVKGNQKRLESLRELAGKENLEYPSVTLPPQPHTKEGVDFAYNEVIARVRMWVNLNLWQKLKLSRDDAKPLLRLKGFPSFPVVERRENEVDWWNTINEVKKLIDAKRDMGRVFWSGVTAEKRNTILEGYNYLPNENDHKKREGSLENPKKPAKRQFGDLLLYLEKKYAGDWGKVFDEAWERIDKKIAGLTSHIEREEARNAEDAQSKAVLTDWLRAKASFVLERLKEMDEKEFYACEIQLQKWYGDLRGNPFAVEAENRVVDISGFSIGSDGHSIQYRNLLAWKYLENGKREFYLLMNYGKKGRIRFTDGTDIKKSGKWQGLLYGGGKAKVIDLTFDPDDEQLIILPLAFGTRQGREFIWNDLLSLETGLIKLANGRVIEKTIYNKKIGRDEPALFVALTFERREVVDPSNIKPVNLIGVARGENIPAVIALTDPEGCPLPEFKDSSGGPTDILRIGEGYKEKQRAIQAAKEVEQRRAGGYSRKFASKSRNLADDMVRNSARDLFYHAVTHDAVLVFANLSRGFGRQGKRTFMTERQYTKMEDWLTAKLAYEGLTSKTYLSKTLAQYTSKTCSNCGFTITYADMDVMLVRLKKTSDGWATTLNNKELKAEYQITYYNRYKRQTVEKELSAELDRLSEESGNNDISKWTKGRRDEALFLLKKRFSHRPVQEQFVCLDCGHEVHAAEQAALNIARSWLFLNSNSTEFKSYKSGKQPFVGAWQAFYKRRLKEVWKPNA

SEQ ID NO: 63 - protein, 1210 aa, Unknown
  Description of Unknown: Uncultured Parcubacteria group bacterium
MSKRHPRISGVKGYRLHAQRLEYTGKSGAMRTIKYPLYSSPSGGRTVPREIVSAINDDYVGLYGLSNFDDLYNAEKRNEEKVYSVLDFWYDCVQYGAVFSYTAPGLLKNVAEVRGGSYELTKTLKGSHLYDELQIDKVIKFLNKKEISRANGSLDKLKKDIIDCFKAEYRERHKDQCNKLADDIKNAKKDAGASLGERQKKLFRDFFGISEQSENDKPSFTNPLNLTCCLLPFDTVNNNRNRGEVLFNKLKEYAQKLDKNEGSLEMWEYIGIGNSGTAFSNFLGEGFLGRLRENKITELKKAMMDITDAWRGQEQEEELEKRLRILAALTIKLREPKFDNHWGGYRSDINGKLSSWLQNYINQTVKIKEDLKGHKKDLKKAKEMINRFGESDTKEEAVVSSLLESIEKIVPDDSADDEKPDIPAIAIYRRFLSDGRLTLNRFVQREDVQEALIKERLEAEKKKKPKKRKKKSDAEDEKETIDFKELFPHLAKPLKLVPNFYGDSKRELYKKYKNAAIYTDALWKAVEKIYKSAFSSSLKNSFFDTDFDKDFFIKRLQKIFSVYRRFNTDKWKPIVKNSFAPYCDIVSLAENEVLYKPKQSRSRKSAAIDKNRVRLPSTENIAKAGIALARELSVAGFDWKDLLKKEEHEEYIDLIELHKTALALLLAVTETQLDISALDFVENGTVKDFMKTRDGNLVLEGRFLEMFSQSIVFSELRGLAGLMSRKEFITRSAIQTMNGKQAELLYIPHEFQSAKITTPKEMSRAFLDLAPAEFATSLEPESLSEKSLLKLKQMRYYPHYFGYELTRTGQGIDGGVAENALRLEKSPVKKREIKCKQYKTLGRGQNKIVLYVRSSYYQTQFLEWFLHRPKNVQTDVAVSGSFLIDEKKVKTRWNYDALTVALEPVSGSERVFVSQPFTIFPEKSAEEEGQRYLGIDIGEYGIAYTALEITGDSAKILDQNFISDPQLKTLREEVKGLKLDQRRGTFAMPSTKIARIRESLVHSLRNRIHHLALKHKAKIVYELEVSRFEEGKQKIKKVYATLKKADVYSEIDADKNLQTTVWGKLAVASEISASYTSQFCGACKKLWRAEMQVDETITTQELIGTVRVIKGGTLIDAIKDFMRPPIFDENDTPFPKYRDFCDKHHISKKMRGNSCLFICPFCRANADADIQASQTIALLRYVKEEKKVEDYFERFRKLKNIKVLGQMKKI

SEQ ID NO: 64 - protein, 1129 aa, Alicyclobacillus acidoterrestris
MAVKSIKVKLRLDDMPEIRAGLWKLHKEVNAGVRYYTEWLSLLRQENLYRRSPNGDGEQECDKTAEECKAELLERLRARQVENGHRGPAGSDDELLQLARQLYELLVPQAIGAKGDAQQIARKFLSPLADKDAVGGLGIAKAGNKPRWVRMREAGEPGWEEEKEKAETRKSADRTADVLRALADFGLKPLMRVYTDSEMSSVEWKPLRKGQAVRTWDRDMFQQAIERMMSWESWNQRVGQEYAKLVEQKNRFEQKNFVGQEHLVHLVNQLQQDMKEASPGLESKEQTAHYVTGRALRGSDKVFEKWGKLAPDAPFDLYDAEIKNVQRRNTRRFGSHDLFAKLAEPEYQALWREDASFLTRYAVYNSILRKLNHAKMFATFTLPDATAHPIWTRFDKLGGNLHQYTFLFNEFGERRHAIRFHKLLKVENGVAREVDDVTVPISMSEQLDNLLPRDPNEPIALYFRDYGAEQHFTGEFGGAKIQCRRDQLAHMHRRRGARDVYLNVSVRVQSQSEARGERRPPYAAVFRLVGDNHRAFVHFDKLSDYLAEHPDDGKLGSEGLLSGLRVMSVDLGLRTSASISVFRVARKDELKPNSKGRVPFFFPIKGNDNLVAVHERSQLLKLPGETESKDLRAIREERQRTLRQLRTQLAYLRLLVRCGSEDVGRRERSWAKLIEQPVDAANHMTPDWREAFENELQKLKSLHGICSDKEWMDAVYESVRRVWRHMGKQVRDWRKDVRSGERPKIRGYAKDVVGGNSIEQIEYLERQYKFLKSWSFFGKVSGQVIRAEKGSRFAITLREHIDHAKEDRLKKLADRIIMEALGYVYALDERGKGKWVAKYPPCQLILLEELSEYQFNNDRPPSENNQLMQWSHRGVFQELINQAQVHDLLVGTMYAAFSSRFDARTGAPGIRCRRVPARCTQEHNPEPFPWWLNKFVVEHTLDACPLRADDLIPTGEGEIFVSPFSAEEGDFHQIHADLNAAQNLQQRLWSDFDISQIRLRCDWGEVDGELVLIPRLTGKRTADSYSNKVFYTNTGVTYYERERGKKRRKVFAQEKLSEEEAELLVEADEAREKSVVLMRDPSGIINRGNWTRQKEFWSMVNQRIEGYLVKQIRSRVPLQDSACENTGDI

SEQ ID NO: 65 - protein, 1140 aa, Bacillus hisashii
MAPKKKRKVGIHGVPAAATRSFILKIEPNEEVKKGLWKTHEVLNHGIAYYMNILKLIRQEAIYEHHEQDPKNPKKVSKAEIQAELWDFVLKMQKCNSFTHEVDKDEVFNILRELYEELVPSSVEKKGEANQLSNKFLYPLVDPNSQSGKGTASSGRKPRWYNLKIAGDPSWEEEKKKWEEDKKKDPLAKILGKLAEYGLIPLFIPYTDSNEPIVKEIKWMEKSRNQSVRRLDKDMFIQALERFLSWESWNLKVKEEYEKVEKEYKTLEERIKEDIQALKALEQYEKERQEQLLRDTLNTNEYRLSKRGLRGWREIIQKWLKMDENEPSEKYLEVFKDYQRKHPREAGDYSVYEFLSKKENHFIWRNHPEYPYLYATFCEIDKKKKDAKQQATFTLADPINHPLWVRFEERSGSNLNKYRILTEQLHTEKLKKKLTVQLDRLIYPTESGGWEEKGKVDIVLLPSRQFYNQIFLDIEEKGKHAFTYKDESIKFPLKGTLGGARVQFDRDHLRRYPHKVESGNVGRIYFNMTVNIEPTESPVSKSLKIHRDDFPKVVNFKPKELTEWIKDSKGKKLKSGIESLEIGLRVMSIDLGQRQAAAASIFEVVDQKPDIEGKLFFPIKGTELYAVHRASFNIKLPGETLVKSREVLRKAREDNLKLMNQKLNFLRNVLHFQQFEDITEREKRVTKWISRQENSDVPLVYQDELIQIRELMYKPYKDWVAFLKQLHKRLEVEIGKEVKHWRKSLSDGRKGLYGISLKNIDEIDRTRKFLLRWSLRPTEPGEVRRLEPGQRFAIDQLNHLNALKEDRLKKMANTIIMHALGYCYDVRKKKWQAKNPACQIILFEDLSNYNPYEERSRFENSKLMKWSRREIPRQVALQGEIYGLQVGEVGAQFSSRFHAKTGSPGIRCSVVTKEKLQDNRFFKNLQREGRLTLDKIAVLKEGDLYPDKGGEKFISLSKDRKCVTTHADINAAQNLQKRFWTRTHGFYKVYCKAYQVDGQTVYIPESKDQKQKIIEEFGEGYFILKDGVYEWVNAGKLKIKKGSSKQSSSELVDSDILKDSFDLASELKGEKLMLYRDPSGNVFPSDKWMAAGVFFGKLERILISKLTNQYSISTIEDDSSKQSMKRPAATKKAGQAKKKK

SEQ ID NO: 66 - protein, 1112 aa, Bacillus sp.
MAIRSIKLKMKTNSGTDSIYLRKALWRTHQLINEGIAYYMNLLTLYRQEAIGDKTKEAYQAELINIIRNQQRNNGSSEEHGSDQEILALLRQLYELIIPSSIGESGDANQLGNKFLYPLVDPNSQSGKGTSNAGRKPRWKRLKEEGNPDWELEKKKDEERKAKDPTVKIFDNLNKYGLLPLFPLFTNIQKDIEWLPLGKRQSVRKWDKDMFIQAIERLLSWESWNRRVADEYKQLKEKTESYYKEHLTGGEEWIEKIRKFEKERNMELEKNAFAPNDGYFITSRQIRGWDRVYEKWSKLPESASPEELWKVVAEQQNKMSEGFGDPKVFSFLANRENRDIWRGHSERIYHIAAYNGLQKKLSRTKEQATFTLPDAIEHPLWIRYESPGGTNLNLFKLEEKQKKNYYVTLSKIIWPSEEKWIEKENIEIPLAPSIQFNRQIKLKQHVKGKQEISFSDYSSRISLDGVLGGSRIQFNRKYIKNHKELLGEGDIGPVFFNLVVDVAPLQETRNGRLQSPIGKALKVISSDFSKVIDYKPKELMDWMNTGSASNSFGVASLLEGMRVMSIDMGQRTSASVSIFEVVKELPKDQEQKLFYSINDTELFAIHKRSFLLNLPGEVVTKNNKQQRQERRKKRQFVRSQIRMLANVLRLETKKTPDERKKAIHKLMEIVQSYDSWTASQKEVWEKELNLLTNMAAFNDEIWKESLVELHHRIEPYVGQIVSKWRKGLSEGRKNLAGISMWNIDELEDTRRLLISWSKRSRTPGEANRIETDEPFGSSLLQHIQNVKDDRLKQMANLIIMTALGFKYDKEEKDRYKRWKETYPACQIILFENLNRYLFNLDRSRRENSRLMKWAHRSIPRTVSMQGEMFGLQVGDVRSEYSSRFHAKTGAPGIRCHALTEEDLKAGSNTLKRLIEDGFINESELAYLKKGDIIPSQGGELFVTLSKRYKKDSDNNELTVIHADINAAQNLQKRFWQQNSEVYRVPCQLARMGEDKLYIPKSQTETIKKYFGKGSFVKNNTEQEVYKWEKSEKMKIKTDTTFDLQDLDGFEDISKTIELAQEQQKKYLTMFRDPSGYFFNNETWRPQKEYWSIVNNIIKSCLKKKILSNKVEL

SEQ ID NO: 67 - protein, 1300 aa, Francisella novicida
MSIYQEFVNKYSLSKTLRFELIPQGKTLENIKARGLILDDEKRAKDYKKAKQIIDKYHQFFIEEILSSVCISEDLLQNYSDVYFKLKKSDDDNLQKDFKSAKDTIKKQISEYIKDSEKFKNLFNQNLIDAKKGQESDLILWLKQSKDNGIELFKANSDITDIDEALEIIKSFKGWTTYFKGFHENRKNVYSSNDIPTSIIYRIVDDNLPKFLENKAKYESLKDKAPEAINYEQIKKDLAEELTFDIDYKTSEVNQRVFSLDEVFEIANFNNYLNQSGITKFNTIIGGKFVNGENTKRKGINEYINLYSQQINDKTLKKYKMSVLFKQILSDTESKSFVIDKLEDDSDVVTTMQSFYEQIAAFKTVEEKSIKETLSLLFDDLKAQKLDLSKIYFKNDKSLTDLSQQVFDDYSVIGTAVLEYITQQIAPKNLDNPSKKEQELIAKKTEKAKYLSLETIKLALEEFNKHRDIDKQCRFEEILANFAAIPMIFDEIAQNKDNLAQISIKYQNQGKKDLLQASAEDDVKAIKDLLDQTNNLLHKLKIFHISQSEDKANILDKDEHFYLVFEECYFELANIVPLYNKIRNYITQKPYSDEKFKLNFENSTLANGWDKNKEPDNTAILFIKDDKYYLGVMNKKNNKIFDDKAIKENKGEGYKKIVYKLLPGANKMLPKVFFSAKSIKFYNPSEDILRIRNHSTHTKNGSPQKGYEKFEFNIEDCRKFIDFYKQSISKHPEWKDFGFRFSDTQRYNSIDEFYREVENQGYKLTFENISESYIDSVVNQGKLYLFQIYNKDFSAYSKGRPNLHTLYWKALFDERNLQDVVYKLNGEAELFYRKQSIPKKITHPAKEAIANKNKDNPKKESVFEYDLIKDKRFTEDKFFFHCPITINFKSSGANKFNDEINLLLKEKANDVHILSIDRGERHLAYYTLVDGKGNIIKQDTFNIIGNDRMKTNYHDKLAAIEKDRDSARKDWKKINNIKEMKEGYLSQVVHEIAKLVIEYNAIVVFEDLNFGFKRGRFKVEKQVYQKLEKMLIEKLNYLVFKDNEFDKTGGVLRAYQLTAPFETFKKMGKQTGIIYYVPAGFTSKICPVTGFVNQLYPKYESVSKSQEFFSKFDKICYNLDKGYFEFSFDYKNFGDKAAKGKWTIASFGSRLINFRNSDKNHNWDTREVYPTKELEKLLKDYSIEYGHGECIKAAICGESDKKFFAKLTSVLNTILQMRNSKTGTELDYLISPVADVNGNFFDSRQAPKNMPQDADANGAYHIGLKGLMLLGRIKNNQEGKKLNLVIKNEEYFEFVQNRNN

SEQ ID NO: 68 - protein, 1300 aa, Francisella novicida
MSIYQEFVNKYSLSKTLRFELIPQGKTLENIKARGLILDDEKRAKDYKKAKQIIDKYHQFFIEEILSSVCISEDLLQNYSDVYFKLKKSDDDNLQKDFKSAKDTIKKQISEYIKDSEKFKNLFNQNLIDAKKGQESDLILWLKQSKDNGIELFKANSDITDIDEALEIIKSFKGWTTYFKGFHENRKNVYSSNDIPTSIIYRIVDDNLPKFLENKAKYESLKDKAPEAINYEQIKKDLAEELTFDIDYKTSEVNQRVFSLDEVFEIANFNNYLNQSGITKFNTIIGGKFVNGENTKRKGINEYINLYSQQINDKTLKKYKMSVLFKQILSDTESKSFVIDKLEDDSDVVTTMQSFYEQIAAFKTVEEKSIKETLSLLFDDLKAQKLDLSKIYFKNDKSLTDLSQQVFDDYSVIGTAVLEYITQQIAPKNLDNPSKKEQELIAKKTEKAKYLSLETIKLALEEFNKHRDIDKQCRFEEILANFAAIPMIFDEIAQNKDNLAQISIKYQNQGKKDLLQASAEDDVKAIKDLLDQTNNLLHKLKIFHISQSEDKANILDKDEHFYLVFEECYFELANIVPLYNKIRNYITQKPYSDEKFKLNFENSTLANGWDKNKEPDNTAILFIKDDKYYLGVMNKKNNKIFDDKAIKENKGEGYKKIVYKLLPGANKMLPKVFFSAKSIKFYNPSEDILRIRNHSTHTKNGSPQKGYEKFEFNIEDCRKFIDFYKQSISKHPEWKDFGFRFSDTQRYNSIDEFYREVENQGYKLTFENISESYIDSVVNQGKLYLFQIYNKDFSAYSKGRPNLHTLYWKALFDERNLQDVVYKLNGEAELFYRKQSIPKKITHPAKEAIANKNKDNPKKESVFEYDLIKDKRFTEDKFFFHCPITINFKSSGANKFNDEINLLLKEKANDVHILSIARGERHLAYYTLVDGKGNIIKQDTFNIIGNDRMKTNYHDKLAAIEKDRDSARKDWKKINNIKEMKEGYLSQVVHEIAKLVIEYNAIVVFEDLNFGFKRGRFKVEKQVYQKLEKMLIEKLNYLVFKDNEFDKTGGVLRAYQLTAPFETFKKMGKQTGIIYYVPAGFTSKICPVTGFVNQLYPKYESVSKSQEFFSKFDKICYNLDKGYFEFSFDYKNFGDKAAKGKWTIASFGSRLINFRNSDKNHNWDTREVYPTKELEKLLKDYSIEYGHGECIKAAICGESDKKFFAKLTSVLNTILQMRNSKTGTELDYLISPVADVNGNFFDSRQAPKNMPQDADANGAYHIGLKGLMLLGRIKNNQEGKKLNLVIKNEEYFEFVQNRNN

SEQ ID NO: 69 - protein, 1300 aa, Francisella novicida
MSIYQEFVNKYSLSKTLRFELIPQGKTLENIKARGLILDDEKRAKDYKKAKQIIDKYHQFFIEEILSSVCISEDLLQNYSDVYFKLKKSDDDNLQKDFKSAKDTIKKQISEYIKDSEKFKNLFNQNLIDAKKGQESDLILWLKQSKDNGIELFKANSDITDIDEALEIIKSFKGWTTYFKGFHENRKNVYSSNDIPTSIIYRIVDDNLPKFLENKAKYESLKDKAPEAINYEQIKKDLAEELTFDIDYKTSEVNQRVFSLDEVFEIANFNNYLNQSGITKFNTIIGGKFVNGENTKRKGINEYINLYSQQINDKTLKKYKMSVLFKQILSDTESKSFVIDKLEDDSDVVTTMQSFYEQIAAFKTVEEKSIKETLSLLFDDLKAQKLDLSKIYFKNDKSLTDLSQQVFDDYSVIGTAVLEYITQQIAPKNLDNPSKKEQELIAKKTEKAKYLSLETIKLALEEFNKHRDIDKQCRFEEILANFAAIPMIFDEIAQNKDNLAQISIKYQNQGKKDLLQASAEDDVKAIKDLLDQTNNLLHKLKIFHISQSEDKANILDKDEHFYLVFEECYFELANIVPLYNKIRNYITQKPYSDEKFKLNFENSTLANGWDKNKEPDNTAILFIKDDKYYLGVMNKKNNKIFDDKAIKENKGEGYKKIVYKLLPGANKMLPKVFFSAKSIKFYNPSEDILRIRNHSTHTKNGSPQKGYEKFEFNIEDCRKFIDFYKQSISKHPEWKDFGFRFSDTQRYNSIDEFYREVENQGYKLTFENISESYIDSVVNQGKLYLFQIYNKDFSAYSKGRPNLHTLYWKALFDERNLQDVVYKLNGEAELFYRKQSIPKKITHPAKEAIANKNKDNPKKESVFEYDLIKDKRFTEDKFFFHCPITINFKSSGANKFNDEINLLLKEKANDVHILSIDRGERHLAYYTLVDGKGNIIKQDTFNIIGNDRMKTNYHDKLAAIEKDRDSARKDWKKINNIKEMKEGYLSQVVHEIAKLVIEYNAIVVFADLNFGFKRGRFKVEKQVYQKLEKMLIEKLNYLVFKDNEFDKTGGVLRAYQLTAPFETFKKMGKQTGIIYYVPAGFTSKICPVTGFVNQLYPKYESVSKSQEFFSKFDKICYNLDKGYFEFSFDYKNFGDKAAKGKWTIASFGSRLINFRNSDKNHNWDTREVYPTKELEKLLKDYSIEYGHGECIKAAICGESDKKFFAKLTSVLNTILQMRNSKTGTELDYLISPVADVNGNFFDSRQAPKNMPQDADANGAYHIGLKGLMLLGRIKNNQEGKKLNLVIKNEEYFEFVQNRNN

SEQ ID NO: 70 - protein, 1300 aa, Francisella novicida
MSIYQEFVNKYSLSKTLRFELIPQGKTLENIKARGLILDDEKRAKDYKKAKQIIDKYHQFFIEEILSSVCISEDLLQNYSDVYFKLKKSDDDNLQKDFKSAKDTIKKQISEYIKDSEKFKNLFNQNLIDAKKGQESDLILWLKQSKDNGIELFKANSDITDIDEALEIIKSFKGWTTYFKGFHENRKNVYSSNDIPTSIIYRIVDDNLPKFLENKAKYESLKDKAPEAINYEQIKKDLAEELTFDIDYKTSEVNQRVFSLDEVFEIANFNNYLNQSGITKFNTIIGGKFVNGENTKRKGINEYINLYSQQINDKTLKKYKMSVLFKQILSDTESKSFVIDKLEDDSDVVTTMQSFYEQIAAFKTVEEKSIKETLSLLFDDLKAQKLDLSKIYFKNDKSLTDLSQQVFDDYSVIGTAVLEYITQQIAPKNLDNPSKKEQELIAKKTEKAKYLSLETIKLALEEFNKHRDIDKQCRFEEILANFAAIPMIFDEIAQNKDNLAQISIKYQNQGKKDLLQASAEDDVKAIKDLLDQTNNLLHKLKIFHISQSEDKANILDKDEHFYLVFEECYFELANIVPLYNKIRNYITQKPYSDEKFKLNFENSTLANGWDKNKEPDNTAILFIKDDKYYLGVMNKKNNKIFDDKAIKENKGEGYKKIVYKLLPGANKMLPKVFFSAKSIKFYNPSEDILRIRNHSTHTKNGSPQKGYEKFEFNIEDCRKFIDFYKQSISKHPEWKDFGFRFSDTQRYNSIDEFYREVENQGYKLTFENISESYIDSVVNQGKLYLFQIYNKDFSAYSKGRPNLHTLYWKALFDERNLQDVVYKLNGEAELFYRKQSIPKKITHPAKEAIANKNKDNPKKESVFEYDLIKDKRFTEDKFFFHCPITINFKSSGANKFNDEINLLLKEKANDVHILSIDRGERHLAYYTLVDGKGNIIKQDTFNIIGNDRMKTNYHDKLAAIEKDRDSARKDWKKINNIKEMKEGYLSQVVHEIAKLVIEYNAIVVFEDLNFGFKRGRFKVEKQVYQKLEKMLIEKLNYLVFKDNEFDKTGGVLRAYQLTAPFETFKKMGKQTGIIYYVPAGFTSKICPVTGFVNQLYPKYESVSKSQEFFSKFDKICYNLDKGYFEFSFDYKNFGDKAAKGKWTIASFGSRLINFRNSDKNHNWDTREVYPTKELEKLLKDYSIEYGHGECIKAAICGESDKKFFAKLTSVLNTILQMRNSKTGTELDYLISPVADVNGNFFDSRQAPKNMPQDAAANGAYHIGLKGLMLLGRIKNNQEGKKLNLVIKNEEYFEFVQNRNN

SEQ ID NO: 71 - protein, 1300 aa, Francisella novicida
MSIYQEFVNKYSLSKTLRFELIPQGKTLENIKARGLILDDEKRAKDYKKAKQIIDKYHQFFIEEILSSVCISEDLLQNYSDVYFKLKKSDDDNLQKDFKSAKDTIKKQISEYIKDSEKFKNLFNQNLIDAKKGQESDLILWLKQSKDNGIELFKANSDITDIDEALEIIKSFKGWTTYFKGFHENRKNVYSSNDIPTSIIYRIVDDNLPKFLENKAKYESLKDKAPEAINYEQIKKDLAEELTFDIDYKTSEVNQRVFSLDEVFEIANFNNYLNQSGITKFNTIIGGKFVNGENTKRKGINEYINLYSQQINDKTLKKYKMSVLFKQILSDTESKSFVIDKLEDDSDVVTTMQSFYEQIAAFKTVEEKSIKETLSLLFDDLKAQKLDLSKIYFKNDKSLTDLSQQVFDDYSVIGTAVLEYITQQIAPKNLDNPSKKEQELIAKKTEKAKYLSLETIKLALEEFNKHRDIDKQCRFEEILANFAAIPMIFDEIAQNKDNLAQISIKYQNQGKKDLLQASAEDDVKAIKDLLDQTNNLLHKLKIFHISQSEDKANILDKDEHFYLVFEECYFELANIVPLYNKIRNYITQKPYSDEKFKLNFENSTLANGWDKNKEPDNTAILFIKDDKYYLGVMNKKNNKIFDDKAIKENKGEGYKKIVYKLLPGANKMLPKVFFSAKSIKFYNPSEDILRIRNHSTHTKNGSPQKGYEKFEFNIEDCRKFIDFYKQSISKHPEWKDFGFRFSDTQRYNSIDEFYREVENQGYKLTFENISESYIDSVVNQGKLYLFQIYNKDFSAYSKGRPNLHTLYWKALFDERNLQDVVYKLNGEAELFYRKQSIPKKITHPAKEAIANKNKDNPKKESVFEYDLIKDKRFTEDKFFFHCPITINFKSSGANKFNDEINLLLKEKANDVHILSIARGERHLAYYTLVDGKGNIIKQDTFNIIGNDRMKTNYHDKLAAIEKDRDSARKDWKKINNIKEMKEGYLSQVVHEIAKLVIEYNAIVVFADLNFGFKRGRFKVEKQVYQKLEKMLIEKLNYLVFKDNEFDKTGGVLRAYQLTAPFETFKKMGKQTGIIYYVPAGFTSKICPVTGFVNQLYPKYESVSKSQEFFSKFDKICYNLDKGYFEFSFDYKNFGDKAAKGKWTIASFGSRLINFRNSDKNHNWDTREVYPTKELEKLLKDYSIEYGHGECIKAAICGESDKKFFAKLTSVLNTILQMRNSKTGTELDYLISPVADVNGNFFDSRQAPKNMPQDADANGAYHIGLKGLMLLGRIKNNQEGKKLNLVIKNEEYFEFVQNRNN

SEQ ID NO: 72 - protein, 1300 aa, Francisella novicida
MSIYQEFVNKYSLSKTLRFELIPQGKTLENIKARGLILDDEKRAKDYKKAKQIIDKYHQFFIEEILSSVCISEDLLQNYSDVYFKLKKSDDDNLQKDFKSAKDTIKKQISEYIKDSEKFKNLFNQNLIDAKKGQESDLILWLKQSKDNGIELFKANSDITDIDEALEIIKSFKGWTTYFKGFHENRKNVYSSNDIPTSIIYRIVDDNLPKFLENKAKYESLKDKAPEAINYEQIKKDLAEELTFDIDYKTSEVNQRVFSLDEVFEIANFNNYLNQSGITKFNTIIGGKFVNGENTKRKGINEYINLYSQQINDKTLKKYKMSVLFKQILSDTESKSFVIDKLEDDSDVVTTMQSFYEQIAAFKTVEEKSIKETLSLLFDDLKAQKLDLSKIYFKNDKSLTDLSQQVFDDYSVIGTAVLEYITQQIAPKNLDNPSKKEQELIAKKTEKAKYLSLETIKLALEEFNKHRDIDKQCRFEEILANFAAIPMIFDEIAQNKDNLAQISIKYQNQGKKDLLQASAEDDVKAIKDLLDQTNNLLHKLKIFHISQSEDKANILDKDEHFYLVFEECYFELANIVPLYNKIRNYITQKPYSDEKFKLNFENSTLANGWDKNKEPDNTAILFIKDDKYYLGVMNKKNNKIFDDKAIKENKGEGYKKIVYKLLPGANKMLPKVFFSAKSIKFYNPSEDILRIRNHSTHTKNGSPQKGYEKFEFNIEDCRKFIDFYKQSISKHPEWKDFGFRFSDTQRYNSIDEFYREVENQGYKLTFENISESYIDSVVNQGKLYLFQIYNKDFSAYSKGRPNLHTLYWKALFDERNLQDVVYKLNGEAELFYRKQSIPKKITHPAKEAIANKNKDNPKKESVFEYDLIKDKRFTEDKFFFHCPITINFKSSGANKFNDEINLLLKEKANDVHILSIARGERHLAYYTLVDGKGNIIKQDTFNIIGNDRMKTNYHDKLAAIEKDRDSARKDWKKINNIKEMKEGYLSQVVHEIAKLVIEYNAIVVFEDLNFGFKRGRFKVEKQVYQKLEKMLIEKLNYLVFKDNEFDKTGGVLRAYQLTAPFETFKKMGKQTGIIYYVPAGFTSKICPVTGFVNQLYPKYESVSKSQEFFSKFDKICYNLDKGYFEFSFDYKNFGDKAAKGKWTIASFGSRLINFRNSDKNHNWDTREVYPTKELEKLLKDYSIEYGHGECIKAAICGESDKKFFAKLTSVLNTILQMRNSKTGTELDYLISPVADVNGNFFDSRQAPKNMPQDAAANGAYHIGLKGLMLLGRIKNNQEGKKLNLVIKNEEYFEFVQNRNN

SEQ ID NO: 73 - protein, 1300 aa, Francisella novicida
MSIYQEFVNKYSLSKTLRFELIPQGKTLENIKARGLILDDEKRAKDYKKAKQIIDKYHQFFIEEILSSVCISEDLLQNYSDVYFKLKKSDDDNLQKDFKSAKDTIKKQISEYIKDSEKFKNLFNQNLIDAKKGQESDLILWLKQSKDNGIELFKANSDITDIDEALEIIKSFKGWTTYFKGFHENRKNVYSSNDIPTSIIYRIVDDNLPKFLENKAKYESLKDKAPEAINYEQIKKDLAEELTFDIDYKTSEVNQRVFSLDEVFEIANFNNYLNQSGITKFNTIIGGKFVNGENTKRKGINEYINLYSQQINDKTLKKYKMSVLFKQILSDTESKSFVIDKLEDDSDVVTTMQSFYEQIAAFKTVEEKSIKETLSLLFDDLKAQKLDLSKIYFKNDKSLTDLSQQVFDDYSVIGTAVLEYITQQIAPKNLDNPSKKEQELIAKKTEKAKYLSLETIKLALEEFNKHRDIDKQCRFEEILANFAAIPMIFDEIAQNKDNLAQISIKYQNQGKKDLLQASAEDDVKAIKDLLDQTNNLLHKLKIFHISQSEDKANILDKDEHFYLVFEECYFELANIVPLYNKIRNYITQKPYSDEKFKLNFENSTLANGWDKNKEPDNTAILFIKDDKYYLGVMNKKNNKIFDDKAIKENKGEGYKKIVYKLLPGANKMLPKVFFSAKSIKFYNPSEDILRIRNHSTHTKNGSPQKGYEKFEFNIEDCRKFIDFYKQSISKHPEWKDFGFRFSDTQRYNSIDEFYREVENQGYKLTFENISESYIDSVVNQGKLYLFQIYNKDFSAYSKGRPNLHTLYWKALFDERNLQDVVYKLNGEAELFYRKQSIPKKITHPAKEAIANKNKDNPKKESVFEYDLIKDKRFTEDKFFFHCPITINFKSSGANKFNDEINLLLKEKANDVHILSIDRGERHLAYYTLVDGKGNIIKQDTFNIIGNDRMKTNYHDKLAAIEKDRDSARKDWKKINNIKEMKEGYLSQVVHEIAKLVIEYNAIVVFADLNFGFKRGRFKVEKQVYQKLEKMLIEKLNYLVFKDNEFDKTGGVLRAYQLTAPFETFKKMGKQTGIIYYVPAGFTSKICPVTGFVNQLYPKYESVSKSQEFFSKFDKICYNLDKGYFEFSFDYKNFGDKAAKGKWTIASFGSRLINFRNSDKNHNWDTREVYPTKELEKLLKDYSIEYGHGECIKAAICGESDKKFFAKLTSVLNTILQMRNSKTGTELDYLISPVADVNGNFFDSRQAPKNMPQDAAANGAYHIGLKGLMLLGRIKNNQEGKKLNLVIKNEEYFEFVQNRNN

SEQ ID NO: 74 - protein, 1300 aa, Francisella novicida
MSIYQEFVNKYSLSKTLRFELIPQGKTLENIKARGLILDDEKRAKDYKKAKQIIDKYHQFFIEEILSSVCISEDLLQNYSDVYFKLKKSDDDNLQKDFKSAKDTIKKQISEYIKDSEKFKNLFNQNLIDAKKGQESDLILWLKQSKDNGIELFKANSDITDIDEALEIIKSFKGWTTYFKGFHENRKNVYSSNDIPTSIIYRIVDDNLPKFLENKAKYESLKDKAPEAINYEQIKKDLAEELTFDIDYKTSEVNQRVFSLDEVFEIANFNNYLNQSGITKFNTIIGGKFVNGENTKRKGINEYINLYSQQINDKTLKKYKMSVLFKQILSDTESKSFVIDKLEDDSDVVTTMQSFYEQIAAFKTVEEKSIKETLSLLFDDLKAQKLDLSKIYFKNDKSLTDLSQQVFDDYSVIGTAVLEYITQQIAPKNLDNPSKKEQELIAKKTEKAKYLSLETIKLALEEFNKHRDIDKQCRFEEILANFAAIPMIFDEIAQNKDNLAQISIKYQNQGKKDLLQASAEDDVKAIKDLLDQTNNLLHKLKIFHISQSEDKANILDKDEHFYLVFEECYFELANIVPLYNKIRNYITQKPYSDEKFKLNFENSTLANGWDKNKEPDNTAILFIKDDKYYLGVMNKKNNKIFDDKAIKENKGEGYKKIVYKLLPGANKMLPKVFFSAKSIKFYNPSEDILRIRNHSTHTKNGSPQKGYEKFEFNIEDCRKFIDFYKQSISKHPEWKDFGFRFSDTQRYNSIDEFYREVENQGYKLTFENISESYIDSVVNQGKLYLFQIYNKDFSAYSKGRPNLHTLYWKALFDERNLQDVVYKLNGEAELFYRKQSIPKKITHPAKEAIANKNKDNPKKESVFEYDLIKDKRFTEDKFFFHCPITINFKSSGANKFNDEINLLLKEKANDVHILSIARGERHLAYYTLVDGKGNIIKQDTFNIIGNDRMKTNYHDKLAAIEKDRDSARKDWKKINNIKEMKEGYLSQVVHEIAKLVIEYNAIVVFADLNFGFKRGRFKVEKQVYQKLEKMLIEKLNYLVFKDNEFDKTGGVLRAYQLTAPFETFKKMGKQTGIIYYVPAGFTSKICPVTGFVNQLYPKYESVSKSQEFFSKFDKICYNLDKGYFEFSFDYKNFGDKAAKGKWTIASFGSRLINFRNSDKNHNWDTREVYPTKELEKLLKDYSIEYGHGECIKAAICGESDKKFFAKLTSVLNTILQMRNSKTGTELDYLISPVADVNGNFFDSRQAPKNMPQDAAANGAYHIGLKGLMLLGRIKNNQEGKKLNLVIKNEEYFEFVQNRNN

SEQ ID NO: 75 - protein, 1052 aa, Staphylococcus aureus
KRNYILGLDIGITSVGYGIIDYETRDVIDAGVRLFKEANVENNEGRRSKRGARRLKRRRRHRIQRVKKLLFDYNLLTDHSELSGINPYEARVKGLSQKLSEEEFSAALLHLAKRRGVHNVNEVEEDTGNELSTKEQISRNSKALEEKYVAELQLERLKKDGEVRGSINRFKTSDYVKEAKQLLKVQKAYHQLDQSFIDTYIDLLETRRTYYEGPGEGSPFGWKDIKEWYEMLMGHCTYFPEELRSVKYAYNADLYNALNDLNNLVITRDENEKLEYYEKFQIIENVFKQKKKPTLKQIAKEILVNEEDIKGYRVTSTGKPEFTNLKVYHDIKDITARKEIIENAELLDQIAKILTIYQSSEDIQEELTNLNSELTQEEIEQISNLKGYTGTHNLSLKAINLILDELWHTNDNQIAIFNRLKLVPKKVDLSQQKEIPTTLVDDFILSPVVKRSFIQSIKVINAIIKKYGLPNDIIIELAREKNSKDAQKMINEMQKRNRQTNERIEEIIRTTGKENAKYLIEKIKLHDMQEGKCLYSLEAIPLEDLLNNPFNYEVDHIIPRSVSFDNSFNNKVLVKQEENSKKGNRTPFQYLSSSDSKISYETFKKHILNLAKGKGRISKTKKEYLLEERDINRFSVQKDFINRNLVDTRYATRGLMNLLRSYFRVNNLDVKVKSINGGFTSFLRRKWKFKKERNKGYKHHAEDALIIANADFIFKEWKKLDKAKKVMENQMFEEKQAESMPEIETEQEYKEIFITPHQIKHIKDFKDYKYSHRVDKKPNRELINDTLYSTRKDDKGNTLIVNNLNGLYDKDNDKLKKLINKSPEKLLMYHHDPQTYQKLKLIMEQYGDEKNPLYKYYEETGNYLTKYSKKDNGPVIKKIKYYGNKLNAHLDITDDYPNSRNKVVKLSLKPYRFDVYLDNGVYKFVTVKNLDVIKKENYYEVNSKCYEEAKKLKKISNQAEFIASFYNNDLIKINGELYRVIGVNNDLLNRIEVNMIDITYREYLENMNDKRPPRIIKTIASKTQSIKKYSTDILGNLYEVKSKKHPQIIKKG

SEQ ID NO: 76 - protein, 1052 aa, Staphylococcus aureus
KRNYILGLDIGITSVGYGIIDYETRDVIDAGVRLFKEANVENNEGRRSKRGARRLKRRRRHRIQRVKKLLFDYNLLTDHSELSGINPYEARVKGLSQKLSEEEFSAALLHLAKRRGVHNVNEVEEDTGNELSTKEQISRNSKALEEKYVAELQLERLKKDGEVRGSINRFKTSDYVKEAKQLLKVQKAYHQLDQSFIDTYIDLLETRRTYYEGPGEGSPFGWKDIKEWYEMLMGHCTYFPEELRSVKYAYNADLYNALNDLNNLVITRDENEKLEYYEKFQIIENVFKQKKKPTLKQIAKEILVNEEDIKGYRVTSTGKPEFTNLKVYHDIKDITARKEIIENAELLDQIAKILTIYQSSEDIQEELTNLNSELTQEEIEQISNLKGYTGTHNLSLKAINLILDELWHTNDNQIAIFNRLKLVPKKVDLSQQKEIPTTLVDDFILSPVVKRSFIQSIKVINAIIKKYGLPNDIIIELAREKNSKDAQKMINEMQKRNRQTNERIEEIIRTTGKENAKYLIEKIKLHDMQEGKCLYSLEAIPLEDLLNNPFNYEVDHIIPRSVSFDNSFNNKVLVKQEEASKKGNRTPFQYLSSSDSKISYETFKKHILNLAKGKGRISKTKKEYLLEERDINRFSVQKDFINRNLVDTRYATRGLMNLLRSYFRVNNLDVKVKSINGGFTSFLRRKWKFKKERNKGYKHHAEDALIIANADFIFKEWKKLDKAKKVMENQMFEEKQAESMPEIETEQEYKEIFITPHQIKHIKDFKDYKYSHRVDKKPNRELINDTLYSTRKDDKGNTLIVNNLNGLYDKDNDKLKKLINKSPEKLLMYHHDPQTYQKLKLIMEQYGDEKNPLYKYYEETGNYLTKYSKKDNGPVIKKIKYYGNKLNAHLDITDDYPNSRNKVVKLSLKPYRFDVYLDNGVYKFVTVKNLDVIKKENYYEVNSKCYEEAKKLKKISNQAEFIASFYNNDLIKINGELYRVIGVNNDLLNRIEVNMIDITYREYLENMNDKRPPRIIKTIASKTQSIKKYSTDILGNLYEVKSKKHPQIIKKG

SEQ ID NO: 77 - protein, 1052 aa, Staphylococcus aureus
KRNYILGLDIGITSVGYGIIDYETRDVIDAGVRLFKEANVENNEGRRSKRGARRLKRRRRHRIQRVKKLLFDYNLLTDHSELSGINPYEARVKGLSQKLSEEEFSAALLHLAKRRGVHNVNEVEEDTGNELSTKEQISRNSKALEEKYVAELQLERLKKDGEVRGSINRFKTSDYVKEAKQLLKVQKAYHQLDQSFIDTYIDLLETRRTYYEGPGEGSPFGWKDIKEWYEMLMGHCTYFPEELRSVKYAYNADLYNALNDLNNLVITRDENEKLEYYEKFQIIENVFKQKKKPTLKQIAKEILVNEEDIKGYRVTSTGKPEFTNLKVYHDIKDITARKEIIENAELLDQIAKILTIYQSSEDIQEELTNLNSELTQEEIEQISNLKGYTGTHNLSLKAINLILDELWHTNDNQIAIFNRLKLVPKKVDLSQQKEIPTTLVDDFILSPVVKRSFIQSIKVINAIIKKYGLPNDIIIELAREKNSKDAQKMINEMQKRNRQTNERIEEIIRTTGKENAKYLIEKIKLHDMQEGKCLYSLEAIPLEDLLNNPFNYEVDHIIPRSVSFDNSFNNKVLVKQEEASKKGNRTPFQYLSSSDSKISYETFKKHILNLAKGKGRISKTKKEYLLEERDINRFSVQKDFINRNLVDTRYATRGLMNLLRSYFRVNNLDVKVKSINGGFTSFLRRKWKFKKERNKGYKHHAEDALIIANADFIFKEWKKLDKAKKVMENQMFEEKQAESMPEIETEQEYKEIFITPHQIKHIKDFKDYKYSHRVDKKPNRKLINDTLYSTRKDDKGNTLIVNNLNGLYDKDNDKLKKLINKSPEKLLMYHHDPQTYQKLKLIMEQYGDEKNPLYKYYEETGNYLTKYSKKDNGPVIKKIKYYGNKLNAHLDITDDYPNSRNKVVKLSLKPYRFDVYLDNGVYKFVTVKNLDVIKKENYYEVNSKCYEEAKKLKKISNQAEFIASFYKNDLIKINGELYRVIGVNNDLLNRIEVNMIDITYREYLENMNDKRPPHIIKTIASKTQSIKKYSTDILGNLYEVKSKKHPQIIKKG

SEQ ID NO: 78 - protein, 1368 aa, Artificial Sequence
  Description of Artificial Sequence: Synthetic polypeptide
MDKKYSIGLAIGTNSVGWAVITDEYKVPSKKFKVLGNTDRHSIKKNLIGALLFDSGETAEATRLKRTARRRYTRRKNRICYLQEIFSNEMAKVDDSFFHRLEESFLVEEDKKHERHPIFGNIVDEVAYHEKYPTIYHLRKKLVDSTDKADLRLIYLALAHMIKFRGHFLIEGDLNPDNSDVDKLFIQLVQTYNQLFEENPINASGVDAKAILSARLSKSRRLENLIAQLPGEKKNGLFGNLIALSLGLTPNFKSNFDLAEDAKLQLSKDTYDDDLDNLLAQIGDQYADLFLAAKNLSDAILLSDILRVNTEITKAPLSASMIKRYDEHHQDLTLLKALVRQQLPEKYKEIFFDQSKNGYAGYIDGGASQEEFYKFIKPILEKMDGTEELLVKLNREDLLRKQRTFDNGSIPHQIHLGELHAILRRQEDFYPFLKDNREKIEKILTFRIPYYVGPLARGNSRFAWMTRKSEETITPWNFEEVVDKGASAQSFIERMTAFDKNLPNEKVLPKHSLLYEYFTVYNELTKVKYVTEGMRKPAFLSGEQKKAIVDLLFKTNRKVTVKQLKEDYFKKIECFDSVEISGVEDRFNASLGTYHDLLKIIKDKDFLDNEENEDILEDIVLTLTLFEDREMIEERLKTYAHLFDDKVMKQLKRRRYTGWGALSRKLINGIRDKQSGKTILDFLKSDGFANRNFMALIHDDSLTFKEDIQKAQVSGQGDSLHEHIANLAGSPAIKKGILQTVKVVDELVKVMGRHKPENIVIEMARENQTTQKGQKNSRERMKRIEEGIKELGSQILKEHPVENTQLQNEKLYLYYLQNGRDMYVDQELDINRLSDYDVDHIVPQSFLKDDSIDNKVLTRSDKNRGKSDNVPSEEVVKKMKNYWRQLLNAKLITQRKFDNLTKAERGGLSELDKAGFIKRQLVETRAITKHVAQILDSRMNTKYDENDKLIREVKVITLKSKLVSDFRKDFQFYKVREINNYHHAHDAYLNAVVGTALIKKYPKLESEFVYGDYKVYDVRKMIAKSEQEIGKATAKYFFYSNIMNFFKTEITLANGEIRKRPLIETNGETGEIVWDKGRDFATVRKVLSMPQVNIVKKTEVQTGGFSKESILPKRNSDKLIARKKDWDPKKYGGFDSPTVAYSVLVVAKVEKGKSKKLKSVKELLGITIMERSSFEKNPIDFLEAKGYKEVKKDLIIKLPKYSLFELENGRKRMLASAGELQKGNELALPSKYVNFLYLASHYEKLKGSPEDNEQKQLFVEQHKHYLDEIIEQISEFSKRVILADANLDKVLSAYNKHRDKPIREQAENIIHLFTLTNLGAPAAFKYFDTTIDRKRYTSTKEVLDATLIHQSITGLYETRIDLSQLGGD

SEQ ID NO: 79 - protein, 1368 aa, Streptococcus pyogenes [sequence omitted]

SEQ ID NO: 80 - protein, 1368 aa, Streptococcus pyogenes; identical to SEQ ID NO: 54

SEQ ID NO: 81 - protein, 1367 aa, Streptococcus pyogenes
MDKKYSIGLAIGTNSVGWAVITDEYKVPSKKFKVLGNTDRHSIKKNLIGALLFDSGETAEATRLKRTARRRYTRRKNRICYLQEIFSNEMAKVDDSFFHRLEESFVEEDKKHERHPIFGNIVDEVAYHEKYPTIYHLRKKLVDSTDKADLRLIYLALAHMIKFRGHFLIEGDLNPDNSDVDKLFIQLVQTYNQLFEENPINASGVDAKAILSARLSKSRRLENLIAQLPGEKKNGLFGNLIALSLGLTPNFKSNFDLAEDAKLQLSKDTYDDDLDNLLAQIGDQYADLFLAAKNLSDAILLSDILRVNTEITKAPLSASMIKRYDEHHQDLTLLKALVRQQLPEKYKEIFFDQSKNGYAGYIDGGASQEEFYKFIKPILEKMDGTEELLVKLNREDLLRKQRTFDNGSIPHQIHLGELHAILRRQEDFYPFLKDNREKIEKILTFRIPYYVGPLARGNSRFAWMTRKSEETITPWNFEEVVDKGASAQSFIERMTNFDKNLPNEKVLPKHSLLYEYFTVYNELTKVKYVTEGMRKPAFLSGEQKKAIVDLLFKTNRKVTVKQLKEDYFKKIECFDSVEISGVEDRFNASLGTYHDLLKIIKDKDFLDNEENEDILEDIVLTLTLFEDREMIEERLKTYAHLFDDKVMKQLKRRRYTGWGRLSRKLINGIRDKQSGKTILDFLKSDGFANRNFMQLIHDDSLTFKEDIQKAQVSGQGDSLHEHIANLAGSPAIKKGILQTVKVVDELVKVMGRHKPENIVIEMARENQTTQKGQKNSRERMKRIEEGIKELGSQILKEHPVENTQLQNEKLYLYYLQNGRDMYVDQELDINRLSDYDVDHIVPQSFLKDDSIDNKVLTRSDKNRGKSDNVPSEEVVKKMKNYWRQLLNAKLITQRKFDNLTKAERGGLSELDKAGFIKRQLVETRQITKHVAQILDSRMNTKYDENDKLIREVKVITLKSKLVSDFRKDFQFYKVREINNYHHAHDAYLNAVVGTALIKKYPKLESEFVYGDYKVYDVRKMIAKSEQEIGKATAKYFFYSNIMNFFKTEITLANGEIRKRPLIETNGETGEIVWDKGRDFATVRKVLSMPQVNIVKKTEVQTGGFSKESILPKRNSDKLIARKKDWDPKKYGGFESPTVAYSVLVVAKVEKGKSKKLKSVKELLGITIMERSSFEKNPIDFLEAKGYKEVKKDLIIKLPKYSLFELENGRKRMLASAGELQKGNELALPSKYVNFLYLASHYEKLKGSPEDNEQKQLFVEQHKHYLDEIIEQISEFSKRVILADANLDKVLSAYNKHRDKPIREQAENIIHLFTLTNLGAPAAFKYFDTTIDRKQYRSTKEVLDATLIHQSITGLYETRIDLSQLGGD

SEQ ID NO: 82 - protein, 1368 aa, Streptococcus pyogenes
MDKKYSIGLAIGTNSVGWAVITDEYKVPSKKFKVLGNTDRHSIKKNLIGALLFDSGETAEATRLKRTARRRYTRRKNRICYLQEIFSNEMAKVDDSFFHRLEESFLVEEDKKHERHPIFGNIVDEVAYHEKYPTIYHLRKKLVDSTDKADLRLIYLALAHMIKFRGHFLIEGDLNPDNSDVDKLFIQLVQTYNQLFEENPINASGVDAKAILSARLSKSRRLENLIAQLPGEKKNGLFGNLIALSLGLTPNFKSNFDLAEDAKLQLSKDTYDDDLDNLLAQIGDQYADLFLAAKNLSDAILLSDILRVNTEITKAPLSASMIKRYDEHHQDLTLLKALVRQQLPEKYKEIFFDQSKNGYAGYIDGGASQEEFYKFIKPILEKMDGTEELLVKLNREDLLRKQRTFDNGSIPHQIHLGELHAILRRQEDFYPFLKDNREKIEKILTFRIPYYVGPLARGNSRFAWMTRKSEETITPWNFEEVVDKGASAQSFIERMTNFDKNLPNEKVLPKHSLLYEYFTVYNELTKVKYVTEGMRKPAFLSGEQKKAIVDLLFKTNRKVTVKQLKEDYFKKIECFDSVEISGVEDRFNASLGTYHDLLKIIKDKDFLDNEENEDILEDIVLTLTLFEDREMIEERLKTYAHLFDDKVMKQLKRRRYTGWGRLSRKLINGIRDKQSGKTILDFLKSDGFANRNFMQLIHDDSLTFKEDIQKAQVSGQGDSLHEHIANLAGSPAIKKGILQTVKVVDELVKVMGRHKPENIVIEMARENQTTQKGQKNSRERMKRIEEGIKELGSQILKEHPVENTQLQNEKLYLYYLQNGRDMYVDQELDINRLSDYDVDHIVPQSFLKDDSIDNKVLTRSDKNRGKSDNVPSEEVVKKMKNYWRQLLNAKLITQRKFDNLTKAERGGLSELDKAGFIKRQLVETRQITKHVAQILDSRMNTKYDENDKLIREVKVITLKSKLVSDFRKDFQFYKVREINNYHHAHDAYLNAVVGTALIKKYPKLESEFVYGDYKVYDVRKMIAKSEQEIGKATAKYFFYSNIMNFFKTEITLANGEIRKRPLIETNGETGEIVWDKGRDFATVRKVLSMPQVNIVKKTEVQTGGFSKESILPKRNSDKLIARKKDWDPKKYGGFVSPTVAYSVLVVAKVEKGKSKKLKSVKELLGITIMERSSFEKNPIDFLEAKGYKEVKKDLIIKLPKYSLFELENGRKRMLASAGELQKGNELALPSKYVNFLYLASHYEKLKGSPEDNEQKQLFVEQHKHYLDEIIEQISEFSKRVILADANLDKVLSAYNKHRDKPIREQAENIIHLFTLTNLGAPAAFKYFDTTIDRKQYRSTKEVLDATLIHQSITGLYETRIDLSQLGGD

SEQ ID NO: 83 - protein, 1368 aa, Streptococcus pyogenes
MDKKYSIGLAIGTNSVGWAVITDEYKVPSKKFKVLGNTDRHSIKKNLIGALLFDSGETAEATRLKRTARRRYTRRKNRICYLQEIFSNEMAKVDDSFFHRLEESFLVEEDKKHERHPIFGNIVDEVAYHEKYPTIYHLRKKLVDSTDKADLRLIYLALAHMIKFRGHFLIEGDLNPDNSDVDKLFIQLVQTYNQLFEENPINASGVDAKAILSARLSKSRRLENLIAQLPGEKKNGLFGNLIALSLGLTPNFKSNFDLAEDAKLQLSKDTYDDDLDNLLAQIGDQYADLFLAAKNLSDAILLSDILRVNTEITKAPLSASMIKRYDEHHQDLTLLKALVRQQLPEKYKEIFFDQSKNGYAGYIDGGASQEEFYKFIKPILEKMDGTEELLVKLNREDLLRKQRTFDNGSIPHQIHLGELHAILRRQEDFYPFLKDNREKIEKILTFRIPYYVGPLARGNSRFAWMTRKSEETITPWNFEEVVDKGASAQSFIERMTNFDKNLPNEKVLPKHSLLYEYFTVYNELTKVKYVTEGMRKPAFLSGEQKKAIVDLLFKTNRKVTVKQLKEDYFKKIECFDSVEISGVEDRFNASLGTYHDLLKIIKDKDFLDNEENEDILEDIVLTLTLFEDREMIEERLKTYAHLFDDKVMKQLKRRRYTGWGRLSRKLINGIRDKQSGKTILDFLKSDGFANRNFMQLIHDDSLTFKEDIQKAQVSGQGDSLHEHIANLAGSPAIKKGILQTVKVVDELVKVMGRHKPENIVIEMARENQTTQKGQKNSRERMKRIEEGIKELGSQILKEHPVENTQLQNEKLYLYYLQNGRDMYVDQELDINRLSDYDVDHIVPQSFLKDDSIDNKVLTRSDKNRGKSDNVPSEEVVKKMKNYWRQLLNAKLITQRKFDNLTKAERGGLSELDKAGFIKRQLVETRQITKHVAQILDSRMNTKYDENDKLIREVKVITLKSKLVSDFRKDFQFYKVREINNYHHAHDAYLNAVVGTALIKKYPKLESEFVYGDYKVYDVRKMIAKSEQEIGKATAKYFFYSNIMNFFKTEITLANGEIRKRPLIETNGETGEIVWDKGRDFATVRKVLSMPQVNIVKKTEVQTGGFSKESILPKRNSDKLIARKKDWDPKKYGGFVSPTVAYSVLVVAKVEKGKSKKLKSVKELLGITIMERSSFEKNPIDFLEAKGYKEVKKDLIIKLPKYSLFELENGRKRMLASARELQKGNELALPSKYVNFLYLASHYEKLKGSPEDNEQKQLFVEQHKHYLDEIIEQISEFSKRVILADANLDKVLSAYNKHRDKPIREQAENIIHLFTLTNLGAPAAFKYFDTTIDRKEYRSTKEVLDATLIHQSITGLYETRIDLSQLGGD

SEQ ID NO: 84 - protein, 1359 aa, Artificial Sequence
  Description of Artificial Sequence: Synthetic polypeptide
MDKKYSIGLDIGTNSVGWAVITDDYKVPSKKFKVLGNTDRHSIKKNLIGALLFGSGETAEATRLKRTARRRYTRRKNRICYLQEIFSNEMAKVDDSFFHRLEESFLVEEDKKHERHPIFGNIVDEVAYHEKYPTIYHLRKKLADSTDKADLRLIYLALAHMIKFRGHFLIEGDLNPDNSDVDKLFIQLVQIYNQLFEENPINASRVDAKAILSARLSKSRRLENLIAQLPGEKRNGLFGNLIALSLGLTPNFKSNFDLAEDAKLQLSKDTYDDDLDNLLAQIGDQYADLFLAAKNLSDAILLSDILRVNSEITKAPLSASMIKRYDEHHQDLTLLKALVRQQLPEKYKEIFFDQSKNGYAGYIDGGASQEEFYKFIKPILEKMDGTEELLVKLNREDLLRKQRTFDNGSIPHQIHLGELHAILRRQEDFYPFLKDNREKIEKILTFRIPYYVGPLARGNSRFAWMTRKSEETITPWNFEEVVDKGASAQSFIERMTNFDKNLPNEKVLPKHSLLYEYFTVYNELTKVKYVTEGMRKPAFLSGEQKKAIVDLLFKTNRKVTVKQLKEDYFKKIECFDSVEISGVEDRFNASLGAYHDLLKIIKDKDFLDNEENEDILEDIVLTLTLFEDRGMIEERLKTYAHLFDDKVMKQLKRRRYTGWGRLSRKLINGIRDKQSGKTILDFLKSDGFANRNFMQLIHDDSLTFKEDIQKAQVSGQGHSLHEQIANLAGSPAIKKGILQTVKIVDELVKVMGHKPENIVIEMARENQTTQKGQKNSRERMKRIEEGIKELGSQILKEHPVENTQLQNEKLYLYYLQNGRDMYVDQELDINRLSDYDVDHIVPQSFIKDDSIDNKVLTRSDKNRGKSDNVPSEEVVKKMKNYWRQLLNAKLITQRKFDNLTKAERGGLSELDKAGFIKRQLVETRQITKHVAQILDSRMNTKYDENDKLIREVKVITLKSKLVSDFRKDFQFYKVREINNYHHAHDAYLNAVVGTALIKKYPKLESEFVYGDYKVYDVRKMIAKSEQEIGKATAKYFFYSNIMNFFKTEITLANGEIRKRPLIETNGETGEIVWDKGRDFATVRKVLSMPQVNIVKKTEIQTVGQNGGLFDDNPKSPLEVTPSKLVPLKKELNPKKYGGYQKPTTAYPVLLITDTKQLIPISVMNKKQFEQNPVKFLRDRGYQQVGKNDFIKLPKYTLVDIGDGIKRLWASSKEIHKGNQLVVSKKSQILLYHAHHLDSDLSNDYLQNHNQQFDVLFNEIISFSKKCKLGKEHIQKIENVYSNKKNSASIEELAESFIKLLGFTQLGATSPFNFLGVKLNQKQYKGKKDYILPCTEGTLIRQSITGLYETRVDLSKIGED

SEQ ID NO: 85 - protein, 29 aa, Artificial Sequence
  Description of Artificial Sequence: Synthetic peptide
PKKKRKVEGADKRTADGSEFESPKKKRKV

SEQ ID NO: 86 - protein, 23 aa, Artificial Sequence
  Description of Artificial Sequence: Synthetic peptide
RKSGKIAAIVVKRPRKPKKKRKV

SEQ ID NO: 87 - protein, 208 aa, Petromyzon marinus
MTDAEYVRIHEKLDIYTFKKQFFNNKKSVSHRCYVLFELKRRGERRACFWGYAVNKPQSGTERGIHAEIFSIRKVEEYLRDNPGQFTINWYSSWSPCADCAEKILEWYNQELRGNGHTLKIWACKLYYEKNARNQIGLWNLRDNGVGLNVMVSEHYQCCRKIFIQSSHNQLNENRWLEKTLKRAEKRRSELSIMIQVKILHTTKSPAV

SEQ ID NO: 88 - DNA, 766 bp, Petromyzon marinus
tgacacgacacagccgtgtatatgaggaagggtagctggatggggggggggggaatacgttcagagaggacattagcgagcgtcttgttggtggccttgagtctagacacctgcagacatgaccgacgctgagtacgtgagaatccatgagaagttggacatctacacgtttaagaaacagtttttcaacaacaaaaaatccgtgtcgcatagatgctacgttctctttgaattaaaacgacggggtgaacgtagagcgtgtttttggggctatgctgtgaataaaccacagagcgggacagaacgtggaattcacgccgaaatctttagcattagaaaagtcgaagaatacctgcgcgacaaccccggacaattcacgataaattggtactcatcctggagtccttgtgcagattgcgctgaaaagatcttagaatggtataaccaggagctgcgggggaacggccacactttgaaaatctgggcttgcaaactctattacgagaaaaatgcgaggaatcaaattgggctgtggaacctcagagataacggggttgggttgaatgtaatggtaagtgaacactaccaatgttgcaggaaaatattcatccaatcgtcgcacaatcaattgaatgagaatagatggcttgagaagactttgaagcgagctgaaaaacgacggagcgagttgtccattatgattcaggtaaaaatactccacaccactaagagtcctgctgtttaagaggctatgcggatggttttc

SEQ ID NO: 89 - protein, 145 aa, Homo sapiens
MDSLLMNRRKFLYQFKNVRWAKGRRETYLCYVVKRRDSATSFSLDFGYLRNKNGCHVELLFLRYISDWDLDPGRCYRVTWFTSWSPCYDCARHVADFLRGNPNLSLRIFTARLYFCEDRKAEPEGLRRLHRAGVQIAIMTFKAPV

SEQ ID NO: 90 - protein, 145 aa, Homo sapiens; identical to SEQ ID NO: 89

SEQ ID NO: 91 - DNA, 10681 bp, Homo sapiens
agagaaccatcattaattgaagtgagatttttctggcctgagacttgcagggaggcaagaagacactctggacaccactatggacaggtaaagaggcagtcttctcgtgggtgattgcactggccttcctctcagagcaaatctgagtaatgagactggtagctatccctttctctcatgtaactgtctgactgataagatcagcttgatcaatatgcatatatattttttgatctgtctccttttcttctattcagatcttatacgctgtcagcccaattctttctgtttcagacttctcttgatttccctctttttcatgtggcaaaagaagtagtgcgtacaatgtactgattcgtcctgagatttgtaccatggttgaaactaatttatggtaataatattaacatagcaaatctttagagactcaaatcatgaaaaggtaatagcagtactgtactaaaaacggtagtgctaattttcgtaataattttgtaaatattcaacagtaaaacaacttgaagacacactttcctagggaggcgttactgaaataatttagctatagtaagaaaatttgtaattttagaaatgccaagcattctaaattaattgcttgaaagtcactatgattgtgtccattataaggagacaaattcattcaagcaagttatttaatgttaaaggcccaattgttaggcagttaatggcacttttactattaactaatctttccatttgttcagacgtagcttaacttacctcttaggtgtgaatttggttaaggtcctcataatgtctttatgtgcagtttttgataggttattgtcatagaacttattctattcctacatttatgattactatggatgtatgagaataacacctaatccttatactttacctcaatttaactcctttataaagaacttacattacagaataaagattttttaaaaatatatttttttgtagagacagggtcttagcccagccgaggctggtctctaagtcctggcccaagcgatcctcctgcctgggcctcctaaagtgctggaattatagacatgagccatcacatccaatatacagaataaagatttttaatggaggatttaatgttcttcagaaaattttcttgaggtcagacaatgtcaaatgtctcctcagtttacactgagattttgaaaacaagtctgagctataggtccttgtgaagggtccattggaaatacttgttcaaagtaaaatggaaagcaaaggtaaaatcagcagttgaaattcagagaaagacagaaaaggagaaaagatgaaattcaacaggacagaagggaaatatattatcattaaggaggacagtatctgtagagctcattagtgatggcaaaatgacttggtcaggattatttttaacccgcttgtttctggtttgcacggctggggatgcagctagggttctgcctcagggagcacagctgtccagagcagctgtcagcctgcaagcctgaaacactccctcggtaaagtccttcctactcaggacagaaatgacgagaacagggagctggaaacaggcccctaaccagagaagggaagtaatggatcaacaaagttaactagcaggtcaggatcacgcaattcatttcactctgactggtaacatgtgacagaaacagtgtaggcttattgtattttcatgtagagtaggacccaaaaatccacccaaagtcctttatctatgccacatccttcttatctatacttccaggacactttttcttccttatgataaggctctctctctctccacacacacacacacacacacacacacacacacacacacacacacaaacacacaccccgccaaccaaggtgcatgtaaaaagatgtagattcctctgcctttctcatctacacagcccaggagggtaagttaatataagagggatttattggtaagagatgatgcttaatctgtttaacactgggcctcaaagagagaatttcttttcttctgtacttattaagcacctattatgtgttgagcttatatatacaaagggttattatatgctaatatagtaatagtaatggtggttggtactatggtaattaccataaaaattattatccttttaaaataaagctaattattattggatcttttttagtattcattttatgttttttatgtttttgattttttaaaagacaatctcaccctgttacccaggctggagtgcagtggtgcaatcatagctttctgcagtcttgaactcctgggctcaagcaatcctcctgccttggcctcccaaagtgttgggatacagtcatgagccactgcatctggcctaggatccatttagattaaaatatgcattttaaattttaaaataatatggctaatttttaccttatgtaatgtgtatactggcaataaatctagtttgctgcctaaagtttaaagtgctttccagtaagcttcatgtacgtgaggggagacatttaaagtgaaacagacagccaggtgtggtggctcacgcctgtaatcccagcactctgggaggctgaggtgggtggatcgcttgagccctggagttcaagaccagcctgagcaacatggcaaaacgctgtttctataacaaaaattagccgggcatggtggcatgtgcctgtggtcccagctactagggggctgaggcaggagaatcgttggagcccaggaggtcaaggctgcactgagcagtgcttgcgccactgcactccagcctgggtgacaggaccagaccttgcctcaaaaaaataagaagaaaaattaaaaataaatggaaacaactacaaagagctgttgtcctagatgagctacttagttaggctgatattttggtatttaacttttaaagtcagggtctgtcacctgcactacattattaaaatatcaattctcaatgtatatccacacaaagactggtacgtgaatgttcatagtacctttattcacaaaaccccaaagtagagactatccaaatatccatcaacaagtgaacaaataaacaaaatgtgctatatccatgcaatggaataccaccctgcagtacaaagaagctacttggggatgaatcccaaagtcatgacgctaaatgaaagagtcagacatgaaggaggagataatgtatgccatacgaaattctagaaaatgaaagtaacttatagttacagaaagcaaatcagggcaggcatagaggctcacacctgtaatcccagcactttgagaggccacgtgggaagattgctagaactcaggagttcaagaccagcctgggcaacacagtgaaactccattctccacaaaaatgggaaaaaaagaaagcaaatcagtggttgtcctgtggggaggggaaggactgcaaagagggaagaagctctggtggggtgagggtggtgattcaggttctgtatcctgactgtggtagcagtttggggtgtttacatccaaaaatattcgtagaattatgcatcttaaatgggtggagtttactgtatgtaaattatacctcaatgtaagaaaaaataatgtgtaagaaaactttcaattctcttgccagcaaacgttattcaaattcctgagccctttacttcgcaaattctctgcacttctgccccgtaccattaggtgacagcactagctccacaaattggataaatgcatttctggaaaagactagggacaaaatccaggcatcacttgtgctttcatatcaaccatgctgtacagcttgtgttgctgtctgcagctgcaatggggactcttgatttctttaaggaaacttgggttaccagagtatttccacaaatgctattcaaattagtgcttatgatatgcaagacactgtgctaggagccagaaaacaaagaggaggagaaatcagtcattatgtgggaacaacatagcaagatatttagatcattttgactagttaaaaaagcagcagagtacaaaatcacacatgcaatcagtataatccaaatcatgtaaatatgtgcctgtagaaagactagaggaataaacacaagaatcttaacagtcattgtcattagacactaagtctaattattattattagacactatgatatttgagatttaaaaaatctttaatattttaaaatttagagctcttctatttttccatagtattcaagtttgacaatgatcaagtattactctttctttttttttttttttttttttttttgagatggagttttggtcttgttgcccatgctggagtggaatggcatgaccatagctcactgcaacctccacctcctgggttcaagcaaagctgtcgcctcagcctcccgggtagatgggattacaggcgcccaccaccacactcggctaatgtttgtatttttagtagagatggggtttcaccatgttggccaggctggtctcaaactcctgacctcagaggatccacctgcctcagcctcccaaagtgctgggattacagatgtaggccactgcgcccggccaagtattgctcttatacattaaaaaacaggtgtgagccactgcgcccagccaggtattgctcttatacattaaaaaataggccggtgcagtggctcacgcctgtaatcccagcactttgggaagccaaggcgggcagaacacccgaggtcaggagtccaaggccagcctggccaagatggtgaaaccccgtctctattaaaaatacaaacattacctgggcatgatggtgggcgcctgtaatcccagctactcaggaggctgaggcaggaggatccgcggagcctggcagatctgcctgagcctgggaggttgaggctacagtaagccaagatcatgccagtatacttcagcctgggcgacaaagtgagaccgtaacaaaaaaaaaaaaatttaaaaaaagaaatttagatcaagatccaactgtaaaaagtggcctaaacaccacattaaagagtttggagtttattctgcaggcagaagagaaccatcagggggtcttcagcatgggaatggcatggtgcacctggtttttgtgagatcatggtggtgacagtgtggggaatgttattttggagggactggaggcagacagaccggttaaaaggccagcacaacagataaggaggaagaagatgagggcttggaccgaagcagagaagagcaaacagggaaggtacaaattcaagaaatattggggggtttgaatcaacacatttagatgattaattaaatatgaggactgaggaataagaaatgagtcaaggatggttccaggctgctaggctgcttacctgaggtggcaaagtcgggaggagtggcagtttaggacagggggcagttgaggaatattgttttgatcattttgagtttgaggtacaagttggacacttaggtaaagactggaggggaaatctgaatatacaattatgggactgaggaacaagtttattttattttttgtttcgttttcttgttgaagaacaaatttaattgtaatcccaagtcatcagcatctagaagacagtggcaggaggtgactgtcttgtgggtaagggtttggggtccttgatgagtatctctcaattggccttaaatataagcaggaaaaggagtttatgatggattccaggctcagcagggctcaggagggctcaggcagccagcagaggaagtcagagcatcttctttggtttagcccaagtaatgacttccttaaaaagctgaaggaaaatccagagtgaccagattataaactgtactcttgcattttctctccctcctctcacccacagcctcttgatgaaccggaggaagtttctttaccaattcaaaaatgtccgctgggctaagggtcggcgtgagacctacctgtgctacgtagtgaagaggcgtgacagtgctacatccttttcactggactttggttatcttcgcaataaggtatcaattaaagtcggctttgcaagcagtttaatggtcaactgtgagtgcttttagagccacctgctgatggtattacttccatccttttttggcatttgtgtctctatcacattcctcaaatccttttttttatttctttttccatgtccatgcacccatattagacatggcccaaaatatgtgatttaattcctccccagtaatgctgggcaccctaataccactccttccttcagtgccaagaacaactgctcccaaactgtttaccagctttcctcagcatctgaattgcctttgagattaattaagctaaaagcatttttatatgggagaatattatcagcttgtccaagcaaaaattttaaatgtgaaaaacaaattgtgtcttaagcatttttgaaaattaaggaagaagaatttgggaaaaaattaacggtggctcaattctgtcttccaaatgatttcttttccctcctactcacatgggtcgtaggccagtgaatacattcaacatggtgatccccagaaaactcagagaagcctcggctgatgattaattaaattgatctttcggctacccgagagaattacatttccaagagacttcttcaccaaaatccagatgggtttacataaacttctgcccacgggtatctcctctctcctaacacgctgtgacgtctgggcttggtggaatctcagggaagcatccgtggggtggaaggtcatcgtctggctcgttgtttgatggttatattaccatgcaattttctttgcctacatttgtattgaatacatcccaatctccttcctattcggtgacatgacacattctatttcagaaggctttgattttatcaagcactttcatttacttctcatggcagtgcctattacttctcttacaatacccatctgtctgctttaccaaaatctatttccccttttcagatcctcccaaatggtcctcataaactgtcctgcctccacctagtggtccaggtatatttccacaatgttacatcaacaggcacttctagccattttccttctcaaaaggtgcaaaaagcaacttcataaacacaaattaaatcttcggtgaggtagtgtgatgctgcttcctcccaactcagcgcacttcgtcttcctcattccacaaaaacccatagccttccttcactctgcaggactagtgctgccaagggttcagctctacctactggtgtgctcttttgagcaagttgcttagcctctctgtaacacaaggacaatagctgcaagcatccccaaagatcattgcaggagacaatgactaaggctaccagagccgcaataaaagtcagtgaattttagcgtggtcctctctgtctctccagaacggctgccacgtggaattgctcttcctccgctacatctcggactgggacctagaccctggccgctgctaccgcgtcacctggttcacctcctggagcccctgctacgactgtgcccgacatgtggccgactttctgcgagggaaccccaacctcagtctgaggatcttcaccgcgcgcctctacttctgtgaggaccgcaaggctgagcccgaggggctgcggcggctgcaccgcgccggggtgcaaatagccatcatgaccttcaaaggtgcgaaagggccttccgcgcaggcgcagtgcagcagcccgcattcgggattgcgatgcggaatgaatgagttagtggggaagctcgaggggaagaagtgggcggggattctggttcacctctggagccgaaattaaagattagaagcagagaaaagagtgaatggctcagagacaaggccccgaggaaatgagaaaatggggccagggttgcttctttcccctcgatttggaacctgaactgtcttctacccccatatccccgcctttttttcctttttttttttttgaagattatttttactgctggaatacttttgtagaaaaccacgaaagaactttcaaagcctgggaagggctgcatgaaaattcagttcgtctctccagacagcttcggcgcatccttttggtaaggggcttcctcgctttttaaattttctttctttctctacagtcttttttggagtttcgtatatttcttatattttcttattgttcaatcactctcagttttcatctgatgaaaactttatttctcctccacatcagctttttcttctgctgtttcaccattcagagccctctgctaaggttccttttccctcccttttctttcttttgttgtttcacatctttaaatttctgtctctccccagggttgcgtttccttcctggtcagaattcttttctcctttttttttttttttttttttttttttaaacaaacaaacaaaaaacccaaaaaaactctttcccaatttactttcttccaacatgttacaaagccatccactcagtttagaagactctccggccccaccgacccccaacctcgttttgaagccattcactcaatttgcttctctctttctctacagcccctgtatgaggttgatgacttacgagacgcatttcgtactttgggactttgatagcaacttccaggaatgtcacacacgatgaaatatctctgctgaagacagtggataaaaaacagtccttcaagtcttctctgtttttattcttcaactctcactttcttagagtttacagaaaaaatatttatatacgactctttaaaaagatctatgtcttgaaaatagagaaggaacacaggtctggccagggacgtgctgcaattggtgcagttttgaatgcaacattgtcccctactgggaataacagaactgcaggacctgggagcatcctaaagtgtcaacgtttttctatgacttttaggtaggatgagagcagaaggtagatcctaaaaagcatggtgagaggatcaaatgtttttatatcaacatcctttattatttgattcatttgagttaacagtggtgttagtgatagatttttctattcttttcccttgacgtttactttcaagtaacacaaactcttccatcaggccatgatctataggacctcctaatgagagtatctgggtgattgtgaccccaaaccatctctccaaagcattaatatccaatcatgcgctgtatgttttaatcagcagaagcatgtttttatgtttgtacaaaagaagattgttatgggtggggatggaggtatagaccatgcatggtcaccttcaagctactttaataaaggatcttaaaatgggcaggaggactgtgaacaagacaccctaataatgggttgatgtctgaagtagcaaatcttctggaaacgcaaactcttttaaggaagtccctaatttagaaacacccacaaacttcacatatcataattagcaaacaattggaaggaagttgcttgaatgttggggagaggaaaatctattggctctcgtgggtctcttcatctcagaaatgccaatcaggtcaaggtttgctacattttgtatgtgtgtgatgcttctcccaaaggtatattaactatataagagagttgtgacaaaacagaatgataaagctgcgaaccgtggcacacgctcatagttctagctgcttgggaggttgaggagggaggatggcttgaacacaggtgttcaaggccagcctgggcaacataacaagatcctgtctctcaaaaaaaaaaaaaaaaaaaagaaagagagagggccgggcgtggtggctcacgcctgtaatcccagcactttgggaggccgagccgggcggatcacctgtggtcaggagtttgagaccagcctggccaacatggcaaaaccccgtctgtactcaaaatgcaaaaattagccaggcgtggtagcaggcacctgtaatcccagctacttgggaggctgaggcaggagaatcgcttgaacccaggaggtggaggttgcagtaagctgagatcgtgccgttgcactccagcctgggcgacaagagcaagactctgtctcagaaaaaaaaaaaaaaaagagagagagagagaaagagaacaatatttgggagagaaggatggggaagcattgcaaggaaattgtgctttatccaacaaaatgtaaggagccaataagggatccctatttgtctcttttggtgtctatttgtccctaacaactgtctttgacagtgagaaaaatattcagaataaccatatccctgtgccgttattacctagcaacccttgcaatgaagatgagcagatccacaggaaaacttgaatgcacaactgtcttattttaatcttattgtacataagtttgtaaaagagttaaaaattgttacttcatgtattcatttatattttatattattttgcgtctaatgattttttattaacatgatttccttttctgatatattgaaatggagtctcaaagcttcataaatttataactttagaaatgattctaataacaacgtatgtaattgtaacattgcagtaatggtgctacgaagccatttctcttgatttttagtaaacttttatgacagcaaatttgcttctggctcactttcaatcagttaaataaatgataaataattttggaagctgtgaagataaaataccaaataaaataatataaaagtgatttatatgaagttaaaataaaaaatcagtatgatggaataaacttg

SEQ ID NO: 92 - protein, 198 aa, Homo sapiens [sequence omitted]

SEQ ID NO: 93 - protein, 198 aa, Mus sp.
MDSLLMKQKKFLYHFKNVRWAKGRHETYLCYVVKRRDSATSCSLDFGHLRNKSGCHVELLFLRYISDWDLDPGRCYRVTWFTSWSPCYDCARHVAEFLRWNPNLSLRIFTARLYFCEDRKAEPEGLRRLHRAGVQIGIMTFKDYFYCWNTFVENRERTFKAWEGLHENSVRLTRQLRRILLPLYEVDDLRDAFRMLGF

SEQ ID NO: 94 - protein, 198 aa, Canis sp.
MDSLLMKQRKFLYHFKNVRWAKGRHETYLCYVVKRRDSATSFSLDFGHLRNKSGCHVELLFLRYISDWDLDPGRCYRVTWFTSWSPCYDCARHVADFLRGYPNLSLRIFAARLYFCEDRKAEPEGLRRLHRAGVQIAIMTFKDYFYCWNTFVENREKTFKAWEGLHENSVRLSRQLRRILLPLYEVDDLRDAFRTLGL

SEQ ID NO: 95 - protein, 199 aa, Bos sp.
MDSLLKKQRQFLYQFKNVRWAKGRHETYLCYVVKRRDSPTSFSLDFGHLRNKAGCHVELLFLRYISDWDLDPGRCYRVTWFTSWSPCYDCARHVADFLRGYPNLSLRIFTARLYFCDKERKAEPEGLRRLHRAGVQIAIMTFKDYFYCWNTFVENHERTFKAWEGLHENSVRLSRQLRRILLPLYEVDDLRDAFRTLGL

SEQ ID NO: 96 - protein, 239 aa, Rattus sp.
MAVGSKPKAALVGPHWERERIWCFLCSTGLGTQQTGQTSRWLRPAATQDPVSPPRSLLMKQRKFLYHFKNVRWAKGRHETYLCYVVKRRDSATSFSLDFGYLRNKSGCHVELLFLRYISDWDLDPGRCYRVTWFTSWSPCYDCARHVADFLRGNPNLSLRIFTARLTGWGALPAGLMSPARPSDYFYCWNTFVENHERTFKAWEGLHENSVRLSRRLRRILLPLYEVDDLRDAFRTLGL

SEQ ID NO: 97 - protein, 429 aa, Mus sp.
MGPFCLGCSHRKCYSPIRNLISQETFKFHFKNLGYAKGRKDTFLCYEVTRKDCDSPVSLHHGVFKNKDNIHAEICFLYWFHDKVLKVLSPREEFKITWYMSWSPCFECAEQIVRFLATHHNLSLDIFSSRLYNVQDPETQQNLCRLVQEGAQVAAMDLYEFKKCWKKFVDNGGRRFRPWKRLLTNFRYQDSKLQEILRPCYIPVPSSSSSTLSNICLTKGLPETRFCVEGRRMDPLSEEEFYSQFYNQRVKHLCYYHRMKPYLCYQLEQFNGQAPLKGCLLSEKGKQHAEILFLDKIRSMELSQVTITCYLTWSPCPNCAWQLAAFKRDRPDLILHIYTSRLYFHWKRPFQKGLCSLWQSGILVDVMDLPQFTDCWTNFVNPKRPFWPWKGLEIISRRTQRRLRRIKESWGLQDLVNDFGNLQLGPPMS

SEQ ID NO: 98 - protein, 430 aa, Rattus sp.
MGPFCLGCSHRKCYSPIRNLISQETFKFHFKNRLRYAIDRKDTFLCYEVTRKDCDSPVSLHHGVFKNKDNIHAEICFLYWFHDKVLKVLSPREEFKITWYMSWSPCFECAEQVLRFLATHHNLSLDIFSSRLYNIRDPENQQNLCRLVQEGAQVAAMDLYEFKKCWKKFVDNGGRRFRPWKKLLTNFRYQDSKLQEILRPCYIPVPSSSSSTLSNICLTKGLPETRFCVERRRVHLLSEEEFYSQFYNQRVKHLCYYHGVKPYLCYQLEQFNGQAPLKGCLLSEKGKQHAEILFLDKIRSMELSQVIITCYLTWSPCPNCAWQLAAFKRDRPDLILHIYTSRLYFHWKRPFQKGLCSLWQSGILVDVMDLPQFTDCWTNFVNPKRPFWPWKGLEIISRRTQRRLHRIKESWGLQDLVNDFGNLQLGPPMS

SEQ ID NO: 99 - protein, 370 aa, Macaca mulatta
MVEPMDPRTFVSNFNNRPILSGLNTVWLCCEVKTKDPSGPPLDAKIFQGKVYSKAKYHPEMRFLRWFHKWRQLHHDQEYKVTWYVSWSPCTRCANSVATFLAKDPKVTLTIFVARLYYFWKPDYQQALRILCQKRGGPHATMKIMNYNEFQDCWNKFVDGRGKPFKPRNNLPKHYTLLQATLGELLRHLMDPGTFTSNFNNKPWVSGQHETYLCYKVERLHNDTWVPLNQHRGFLRNQAPNIHGFPKGRHAELCFLDLIPFWKLDGQQYRVTCFTSWSPCFSCAQEMAKFISNNEHVSLCIFAARIYDDQGRYQEGLRALHRDGAKIAMMNYSEFEYCWDTFVDRQGRPFQPWDGLDEHSQALSGRLRAI

SEQ ID NO: 100 - protein, 384 aa, Pan sp.
MKPHFRNPVERMYQDTFSDNFYNRPILSHRNTVWLCYEVKTKGPSRPPLDAKIFRGQVYSKLKYHPEMRFFHWFSKWRKLHRDQEYEVTWYISWSPCTKCTRDVATFLAEDPKVTLTIFVARLYYFWDPDYQEALRSLCQKRDGPRATMKIMNYDEFQHCWSKFVYSQRELFEPWNNLPKYYILLHIMLGEILRHSMDPPTFTSNFNNELWVRGRHETYLCYEVERLHNDTWVLLNQRRGFLCNQAPHKHGFLEGRHAELCFLDVIPFWKLDLHQDYRVTCFTSWSPCFSCAQEMAKFISNNKHVSLCIFAARIYDDQGRCQEGLRTLAKAGAKISIMTYSEFKHCWDTFVDHQGCPFQPWDGLEEHSQALSGRLRAILQNQGN

SEQ ID NO: 101 - protein, 377 aa, Chlorocebus sabaeus
MNPQIRNMVEQMEPDIFVYYFNNRPILSGRNTVWLCYEVKTKDPSGPPLDANIFQGKLYPEAKDHPEMKFLHWFRKWRQLHRDQEYEVTWYVSWSPCTRCANSVATFLAEDPKVTLTIFVARLYYFWKPDYQQALRILCQERGGPHATMKIMNYNEFQHCWNEFVDGQGKPFKPRKNLPKHYTLLHATLGELLRHVMDPGTFTSNFNNKPWVSGQRETYLCYKVERSHNDTWVLLNQHRGFLRNQAPDRHGFPKGRHAELCFLDLIPFWKLDDQQYRVTCFTSWSPCFSCAQKMAKFISNNKHVSLCIFAARIYDDQGRCQEGLRTLHRDGAKIAVMNYSEFEYCWDTFVDRQGRPFQPWDGLDEHSQALSGRLRAI

SEQ ID NO: 102 - protein, 384 aa, Homo sapiens
MKPHFRNTVERMYRDTFSYNFYNRPILSRRNTVWLCYEVKTKGPSRPPLDAKIFRGQVYSELKYHPEMRFFHWFSKWRKLHRDQEYEVTWYISWSPCTKCTRDMATFLAEDPKVTLTIFVARLYYFWDPDYQEALRSLCQKRDGPRATMKIMNYDEFQHCWSKFVYSQRELFEPWNNLPKYYILLHIMLGEILRHSMDPPTFTFNFNNEPWVRGRHETYLCYEVERMHNDTWVLLNQRRGFLCNQAPHKHGFLEGRHAELCFLDVIPFWKLDLDQDYRVTCFTSWSPCFSCAQEMAKFISKNKHVSLCIFTARIYDDQGRCQEGLRTLAEAGAKISIMTYSEFKHCWDTFVDHQGCPFQPWDGLDEHSQDLSGRLRAILQNQEN

SEQ ID NO: 103 - protein, 373 aa, Homo sapiens
MKPHFRNTVERMYRDTFSYNFYNRPILSRRNTVWLCYEVKTKGPSRPRLDAKIFRGQVYSQPEHHAEMCFLSWFCGNQLPAYKCFQITWFVSWTPCPDCVAKLAEFLAEHPNVTLTISAARLYYYWERDYRRALCRLSQAGARVKIMDDEEFAYCWENFVYSEGQPFMPWYKFDDNYAFLHRTLKEILRNPMEAMYPHIFYFHFKNLRKAYGRNESWLCFTMEVVKHHSPVSWKRGVFRNQVDPETHCHAERCFLSWFCDDILSPNTNYEVTWYTSWSPCPECAGEVAEFLARHSNVNLTIFTARLYYFWDTDYQEGLRSLSQEGASVEIMGYKDFKYCWENFVYNDDEPFKPWKGLKYNFLFLDSKLQEILE

SEQ ID NO: 104 - protein, 382 aa, Homo sapiens
MNPQIRNPMERMYRDTFYDNFENEPILYGRSYTWLCYEVKIKRGRSNLLWDTGVFRGQVYFKPQYHAEMCFLSWFCGNQLPAYKCFQITWFVSWTPCPDCVAKLAEFLSEHPNVTLTISAARLYYYWERDYRRALCRLSQAGARVTIMDYEEFAYCWENFVYNEGQQFMPWYKFDENYAFLHRTLKEILRYLMDPDTFTFNFNNDPLVLRRRQTYLCYEVERLDNGTWVLMDQHMGFLCNEAKNLLCGFYGRHAELRFLDLVPSLQLDPAQIYRVTWFISWSPCFSWGCAGEVRAFLQENTHVRLRIFAARIYDYDPLYKEALQMLRDAGAQVSIMTYDEFEYCWDTFVYRQGCPFQPWDGLEEHSQALSGRLRAILQNQGN

SEQ ID NO: 105 - protein, 395 aa, Rattus sp.
MQPQGLGPNAGMGPVCLGCSHRRPYSPIRNPLKKLYQQTFYFHFKNVRYAWGRKNNFLCYEVNGMDCALPVPLRQGVFRKQGHIHAELCFIYWFHDKVLRVLSPMEEFKVTWYMSWSPCSKCAEQVARFLAAHRNLSLAIFSSRLYYYLRNPNYQQKLCRLIQEGVHVAAMDLPEFKKCWNKFVDNDGQPFRPWMRLRINFSFYDCKLQEIFSRMNLLREDVFYLQFNNSHRVKPVQNRYYRRKSYLCYQLERANGQEPLKGYLLYKKGEQHVEILFLEKMRSMELSQVRITCYLTWSPCPNCARQLAAFKKDHPDLILRIYTSRLYFWRKKFQKGLCTLWRSGIHVDVMDLPQFADCWTNFVNPQRPFRPWNELEKNSWRIQRRLRRIKESWGL

SEQ ID NO: 106 - protein, 226 aa, Bos sp.
DGWEVAFRSGTVLKAGVLGVSMTEGWAGSGHPGQGACVWTPGTRNTMNLLREVLFKQQFGNQPRVPAPYYRRKTYLCYQLKQRNDLTLDRGCFRNKKQRHAERFIDKINSLDLNPSQSYKIICYITWSPCPNCANELVNFITRNNHLKLEIFASRLYFHWIKSFKMGLQDLQNAGISVAVMTHTEFEDCWEQFVDNQSRPFQPWDKLEQYSASIRRRLQRILTAPI

SEQ ID NO: 107 - protein, 490 aa, Pan sp.
MNPQIRNPMEWMYQRTFYYNFENEPILYGRSYTWLCYEVKIRRGHSNLLWDTGVFRGQMYSQPEHHAEMCFLSWFCGNQLSAYKCFQITWFVSWTPCPDCVAKLAKFLAEHPNVTLTISAARLYYYWERDYRRALCRLSQAGARVKIMDDEEFAYCWENFVYNEGQPFMPWYKFDDNYAFLHRTLKEIIRHLMDPDTFTFNFNNDPLVLRRHQTYLCYEVERLDNGTWVLMDQHMGFLCNEAKNLLCGFYGRHAELRFLDLVPSLQLDPAQIYRVTWFISWSPCFSWGCAGQVRAFLQENTHVRLRIFAARIYDYDPLYKEALQMLRDAGAQVSIMTYDEFEYCWDTFVYRQGCPFQPWDGLEEHSQALSGRLRAILQVRASSLCMVPHRPPPPPQSPGPCLPLCSEPPLGSLLPTGRPAPSLPFLLTASFSFPPPASLPPLPSLSLSPGHLPVPSFHSLTSCSIQPPCSSRIRETEGWASVSKEGRDLG

SEQ ID NO: 108 - protein, 190 aa, Homo sapiens
MNPQIRNPMKAMYPGTFYFQFKNLWEANDRNETWLCFTVEGIKRRSVVSWKTGVFRNQVDSETHCHAERCFLSWFCDDILSPNTKYQVTWYTSWSPCPDCAGEVAEFLARHSNVNLTIFTARLYYFQYPCYQEGLRSLSQEGVAVEIMDYEDFKYCWENFVYNDNEPFKPWKGLKTNFRLLKRRLRESLQ

SEQ ID NO: 109 - protein, 190 aa, Gorilla sp.
MNPQIRNPMKAMYPGTFYFQFKNLWEANDRNETWLCFTVEGIKRRSVVSWKTGVFRNQVDSETHCHAERCFLSWECDDILSPNTNYQVTWYTSWSPCPECAGEVAEFLARHSNVNLTIFTARLYYFQDTDYQEGLRSLSQEGVAVKIMDYKDFKYCWENFVYNDDEPFKPWKGLKYNFRFLKRRLQEILE

SEQ ID NO: 110 - protein, 199 aa, Homo sapiens
MEASPASGPRHLMDPHIFTSNFNNGIGRHKTYLCYEVERLDNGTSVKMDQHRGFLHNQAKNLLCGFYGRHAELRFLDLVPSLQLDPAQIYRVTWFISWSPCFSWGCAGEVRAFLQENTHVRLRIFAARIYDYDPLYKEALQMLRDAGAQVSIMTYDEFKHCWDTFVDHQGCPFQPWDGLDEHSQALSGRLRAILQNQGN

SEQ ID NO: 111 - protein, 202 aa, Macaca mulatta
MDGSPASRPRHLMDPNTFTFNFNNDLSVRGRHQTYLCYEVERLDNGTWVPMDERRGFLCNKAKNVPCGDYGCHVELRFLCEVPSWQLDPAQTYRVTWFISWSPCFRRGCAGQVRVFLQENKHVRLRIFAARIYDYDPLYQEALRTLRDAGAQVSIMTYEEFKHCWDTFVDRQGRPFQPWDGLDEHSQALSGRLRAILQNQGN

SEQ ID NO: 112 - protein, 185 aa, Bos sp.
MDEYTFTENFNNQGWPSKTYLCYEMERLDGDATIPLDEYKGFVRNKGLDQPEKPCHAELYFLGKIHSWNLDRNQHYRLTCFISWSPCYDCAQKLTTFLKENHHISLHILASRIYTHNRFGCHQSGLCELQAAGARITIMTFEDFKHCWETFVDHKGKPFQPWEGLNVKSQALCTELQAILKTQQN

SEQ ID NO: 113 - protein, 200 aa, Homo sapiens
MALLTAETFRLQFNNKRRLRRPYYPRKALLCYQLTPQNGSTPTRGYFENKKKCHAEICFINEIKSMGLDETQCYQVTCYLTWSPCSSCAWELVDFIKAHDHLNLGIFASRLYYHWCKPQQKGLRLLCGSQVPVEVMGFPKFADCWENFVDHEKPLSFNPYKMLEELDKNSRAIKRRLERIKIPGVRAQGRYMDILCDAEV

SEQ ID NO: 114 - protein, 210 aa, Macaca mulatta
MALLTAKTFSLQFNNKRRVNKPYYPRKALLCYQLTPQNGSTPTRGHLKNKKKDHAEIRFINKIKSMGLDETQCYQVTCYLTWSPCPSCAGELVDFIKAHRHLNLRIFASRLYYHWRPNYQEGLLLLCGSQVPVEVMGLPEFTDCWENFVDHKEPPSFNPSEKLEELDKNSQAIKRRLERIKSRSVDVLENGLRSLQLGPVTPSSSIRNSR

SEQ ID NO: 115 - protein, 386 aa, Homo sapiens
MNPQIRNPMERMYRDTFYDNFENEPILYGRSYTWLCYEVKIKRGRSNLLWDTGVFRGPVLPKRQSNHRQEVYFRFENHAEMCFLSWFCGNRLPANRRFQITWFVSWNPCLPCVVKVTKFLAEHPNVTLTISAARLYYYRDRDWRWVLLRLHKAGARVKIMDYEDFAYCWENFVCNEGQPFMPWYKFDDNYASLHRTLKEILRNPMEAMYPHIFYFHFKNLLKACGRNESWLCFTMEVTKHHSAVFRKRGVFRNQVDPETHCHAERCFLSWFCDDILSPNTNYEVTWYTSWSPCPECAGEVAEFLARHSNVNLTIFTARLCYFWDTDYQEGLCSLSQEGASVKIMGYKDFVSCWKNFVYSDDEPFKPWKGLQTNFRLLKRRLREILQ

SEQ ID NO: 116 - protein, 236 aa, Homo sapiens
MTSEKGPSTGDPTLRRRIEPWEFDVFYDPRELRKEACLLYEIKWGMSRKIWRSSGKNTTNHVEVNFIKKFTSERDFHPSMSCSITWFLSWSPCWECSQAIREFLSRHPGVTLVIYVARLFWHMDQQNRQGLRDLVNSGVTIQIMRASEYYHCWRNFVNYPPGDEAHWPQYPPLWMMLYALELHCIILSLPPCLKISRRWQNHLTFFRLHLQNCHYQTIPPHILLATGLIHPSVAWR

SEQ ID NO: 117 - protein, 229 aa, Mus sp.
MSSETGPVAVDPTLRRRIEPHEFEVFFDPRELRKETCLLYEINWGGRHSVWRHTSQNTSNHVEVNFLEKFTTERYFRPNTRCSITWFLSWSPCGECSRAITEFLSRHPYVTLFIYIARLYHHTDQRNRQGLRDLISSGVTIQIMTEQEYCYCWRNFVNYPPSNEAYWPRYPHLWVKLYVLELYCIILGLPPCLKILRRKQPQLTFFTITLQTCHYQRIPPHLLWATGLK

SEQ ID NO: 118 - protein, 229 aa, Rattus sp. [sequence omitted]

SEQ ID NO: 119 - protein, 224 aa, Homo sapiens
MAQKEEAAVATEAASQNGEDLENLDDPEKLKELIELPPFEIVTGERLPANFFKFQFRNVEYSSGRNKTFLCYVVEAQGKGGQVQASRGYLEDEHAAAHAEEAFFNTILPAFDPALRYNVTWYVSSSPCAACADRIIKTLSKTKNLRLLILVGRLFMWEEPEIQAALKKLKEAGCKLRIMKPQDFEYVWQNFVEQEEGESKAFQPWEDIQENFLYYEEKLADILK

SEQ ID NO: 120 - protein, 224 aa, Mus sp.
MAQKEEAAEAAAPASQNGDDLENLEDPEKLKELIDLPPFEIVTGVRLPVNFFKFQFRNVEYSSGRNKTFLCYVVEVQSKGGQAQATQGYLEDEHAGAHAEEAFFNTILPAFDPALKYNVTWYVSSSPCAACADRILKTLSKTKNLRLLILVSRLFMWEEPEVQAALKKLKEAGCKLRIMKPQDFEYIWQNFVEQEEGESKAFEPWEDIQENFLYYEEKLADILK

SEQ ID NO: 121 - protein, 224 aa, Rattus sp.
MAQKEEAAEAAAPASQNGDDLENLEDPEKLKELIDLPPFEIVTGVRLPVNFFKFQFRNVEYSSGRNKTFLCYVVEAQSKGGQVQATQGYLEDEHAGAHAEEAFFNTILPAFDPALKYNVTWYVSSSPCAACADRILKTLSKTKNLRLLILVSRLFMWEEPEVQAALKKLKEAGCKLRIMKPQDFEYLWQNFVEQEEGESKAFEPWEDIQENFLYYEEKLADILK

SEQ ID NO: 122 - protein, 224 aa, Bos sp.
MAQKEEAAAAAEPASQNGEEVENLEDPEKLKELIELPPFEIVTGERLPAHYFKFQFRNVEYSSGRNKTFLCYVVEAQSKGGQVQASRGYLEDEHATNHAEEAFFNSIMPTFDPALRYMVTWYVSSSPCAACADRIVKTLNKTKNLRLLILVGRLFMWEEPEIQAALRKLKEAGCRLRIMKPQDFEYIWQNFVEQEEGESKAFEPWEDIQENFLYYEEKLADILK

SEQ ID NO: 123 - protein, 208 aa, Petromyzon marinus
MTDAEYVRIHEKLDIYTFKKQFFNNKKSVSHRCYVLFELKRRGERRACFWGYAVNKPQSGTERGIHAEIFSIRKVEEYLRDNPGQFTINWYSSWSPCADCAEKILEWYNQELRGNGHTLKIWACKLYYEKNARNQIGLWNLRDNGVGLNVMVSEHYQCCRKIFIQSSHNQLNENRWLEKTLKRAEKRRSELSFMIQVKILHTTKSPAV

SEQ ID NO: 124 - protein, 381 aa, Homo sapiens
MKPHFRNTVERMYRDTFSYNFYNRPILSRRNTVWLCYEVKTKGPSRPPLDAKIFRGQVYSELKYHPEMRFFHWFSKWRKLHRDQEYEVTWYISWSPCTKCTRDMATFLAEDPKVTLTIFVARLYYFWDPDYQEALRSLCQKRDGPRATMKFNYDEFQHCWSKFVYSQRELFEPWNNLPKYYILLHFMLGEILRHSMDPPTFTFNFNNEPWVRGRHETYLCYEVERMHNDTWVLLNQRRGFLCNQAPHKHGFLEGRHAELCFLDVIPFWKLDLDQDYRVTCFTSWSPCFSCAQEMAKFISKKHVSLCIFTARIYRRQGRCQEGLRTLAEAGAKISFTYSEFKHCWDTFVDHQGCPFQPWDGLDEHSQDLSGRLRAILQNQEN

SEQ ID NO: 125 - protein, 182 aa, Homo sapiens
MDPPTFTFNFNNEPWWGRHETYLCYEVERMHNDTWVLLNQRRGFLCNQAPHKHGFLEGRHAELCFLDVIPFWKLDLDQDYRVTCFTSWSPCFSCAQEMAKFISKNKHVSLCIFTARIYDDQGRCQEGLRTLAEAGAKISFTYSEFKHCWDTFVDHQGCPFQPWDGLDEHSQDLSGRLRAILQ

SEQ ID NO: 126 - protein, 184 aa, Homo sapiens
MDPPTFTFNFNNEPWVRGRHETYLCYEVERMHNDTWVLLNQRRGFLCNQAPHKHGFLEGRHAELCFLDVIPFWKLDLDQDYRVTCFTSWSPCFSCAQEMAKFISKNKHVSLCIFTARIYRRQGRCQEGLRTLAEAGAKISFMTYSEFKHCWDTFVDHQGCPFQPWDGLDEHSQDLSGRLRAILQ

SEQ ID NO: 127 - protein, 167 aa, Unknown
  Description of Unknown: TadA sequence
MSEVEFSHEYWMRHALTLAKRAWDEREVPVGAVLVHNNRVIGEGWNRPIGRHDPTAHAEIMALRQGGLVMQNYRLIDATLYVTLEPCVMCAGAMIHSRIGRVVFGARDAKTGAAGSLMDVLHHPGMNHRVEITEGILADECAALLSDFFRMRRQEIKAQKKAQSSTD

SEQ ID NO: 128 - protein, 167 aa, Artificial Sequence
  Description of Artificial Sequence: Synthetic polypeptide
MSEVEFSHEYWMRHALTLAKRARDEREVPVGAVLVLNNRVIGEGWNRAIGLHDPTAHAEIMALRQGGLVMQNYRLIDATLYVTFEPCVMCAGAMIHSRIGRVVFGVRNAKTGAAGSLMDVLHYPGMNHRVEITEGILADECAALLCYFFRMPRQVFNAQKKAQSSTD

SEQ ID NO: 129 - protein, 178 aa, Escherichia coli
MRRAFITGVFFLSEVEFSHEYWMRHALTLAKRAWDEREVPVGAVLVHNNRVIGEGWNRPIGRHDPTAHAEIMALRQGGLVMQNYRLIDATLYVTLEPCVMCAGAMIHSRIGRVVFGARDAKTGAAGSLMDVLHHPGMNHRVEITEGILADECAALLSDFFRMRRQEIKAQKKAQSSTD

SEQ ID NO: 130 - protein, 160 aa, Staphylococcus aureus
MGSHMTNDIYFMTLAIEEAKKAAQLGEVPIGAIITKDDEVIARAHNLRETLQQPTAHAEHIAIERAAKVLGSWRLEGCTLYVTLEPCVMCAGTIVMSRIPRVVYGADDPKGGCSGSLMNLLQQSNFNHRAIVDKGVLKEACSTLLTTFFKNLRANKKSTN

SEQ ID NO: 131 - protein, 161 aa, Bacillus subtilis
MTQDELYMKEAIKEAKKAEEKGEVPIGAVLVINGEIIARAHNLRETEQRSIAHAEMLVIDEACKALGTWRLEGATLYVTLEPCPMCAGAVVLSRVEKVVFGAFDPKGGCSGTLMNLLQEERFNHQAEVVSGVLEEECGGMLSAFFRELRKKKKAARKNLSE

SEQ ID NO: 132 - protein, 183 aa, Salmonella typhimurium
MPPAFITGVTSLSDVELDHEYWMRHALTLAKRAWDEREVPVGAVLVHNHRVIGEGWNRPIGRHDPTAHAEIMALRQGGLVLQNYRLLDTTLYVTLEPCVMCAGAMVHSRIGRVVFGARDAKTGAAGSLIDVLHHPGMNHRVEIIEGVLRDECATLLSDFFRMRRQEIKALKKADRAEGAGPAV

SEQ ID NO: 133 - protein, 164 aa, Shewanella putrefaciens
MDEYWMQVAMQMAEKAEAAGEVPVGAVLVKDGQQIATGYNLSISQHDPTAHAEILCLRSAGKKLENYRLLDATLYITLEPCAMCAGAMVHSRIARVVYGARDEKTGAAGTVVNLLQHPAFNHQVEVTSGVLAEACSAQLSRFFKRRRDEKKALKLAQRAQQGIE

SEQ ID NO: 134 - protein, 173 aa, Haemophilus influenzae
MDAAKVRSEFDEKMMRYALELADKAEALGEIPVGAVLVDDARNIIGEGWNLSIVQSDPTAHAEIIALRNGAKNIQNYRLLNSTLYVTLEPCTMCAGAILHSRIKRLVFGASDYKTGAIGSRFHFFDDYKMNHTLEITSGVLAEECSQKLSTFFQKRREEKKIEKALLKSLSDK

SEQ ID NO: 135 - protein, 161 aa, Caulobacter crescentus
MRTDESEDQDHRMMRLALDAARAAAEAGETPVGAVILDPSTGEVIATAGNGPIAAHDPTAHAEIAAMRAAAAKLGNYRLTDLTLVVTLEPCAMCAGAISHARIGRVVFGADDPKGGAVVHGPKFFAQPTCHWRPEVTGGVLADESADLLRGFFRARRKAKI

SEQ ID NO: 136 - protein, 179 aa, Geobacter sulfurreducens
MSSLKKTPIRDDAYWMGKAIREAAKAAARDEVPIGAVIVRDGAVIGRGHNLREGSNDPSAHAEMIAIRQAARRSANWRLTGATLYVTLEPCLMCMGAIILARLERVVFGCYDPKGGAAGSLYDLSADPRLNHQVRLSPGVCQEECGTMLSDFFRDLRRRKKAKATPALFIDERKVPPEP

SEQ ID NO: 137 - protein, 167 aa, Escherichia coli; identical to SEQ ID NO: 128

SEQ ID NO: 138 - protein, 8 aa, Artificial Sequence
  Description of Artificial Sequence: Synthetic peptide
SGGSSGGS

SEQ ID NO: 139 - protein, 21 aa, Artificial Sequence
  Description of Artificial Sequence: Synthetic peptide
  MISC_FEATURE (1)..(21): This sequence may encompass 1, 3 or 7 "Gly Gly Ser" repeating units
GGSGGSGGSGGSGGSGGSGGS

SEQ ID NO: 140 - RNA, 20 nt, Unknown
  Description of Unknown: Target sequence
gacaagaaagggacugaagc

SEQ ID NO: 141 - RNA, 20 nt, Unknown
  Description of Unknown: Target sequence
aucgacaagaaagggacuga

SEQ ID NO: 142 - RNA, 20 nt, Unknown
  Description of Unknown: Target sequence
acacaccgguugguggccuc

SEQ ID NO: 143 - RNA, 20 nt, Unknown
  Description of Unknown: Target sequence
cuccagcuggaccuccuccu

SEQ ID NO: 144 - RNA, 20 nt, Unknown
  Description of Unknown: Target sequence
ucccaggaggagguccagcu

SEQ ID NO: 145 - RNA, 20 nt, Unknown
  Description of Unknown: Target sequence
cucuccacuggaggaaaaca

SEQ ID NO: 146 - RNA, 20 nt, Unknown
  Description of Unknown: Target sequence
cugugugucgaaguucgccc

SEQ ID NO: 147 - RNA, 20 nt, Unknown
  Description of Unknown: Target sequence
ugugugucgaaguucgcccu

SEQ ID NO: 148 - RNA, 20 nt, Unknown
  Description of Unknown: Target sequence
gucgaaguucgcccuggaga

SEQ ID NO: 149 - RNA, 20 nt, Unknown
  Description of Unknown: Target sequence
ugucgaaguucgcccuggag

SEQ ID NO: 150 - RNA, 20 nt, Unknown
  Description of Unknown: Target sequence
guucagaaugcccggaccac

SEQ ID NO: 151 - RNA, 20 nt, Unknown
  Description of Unknown: Target sequence
ucaacuuccauugccauuuc

SEQ ID NO: 152 - RNA, 20 nt, Unknown
  Description of Unknown: Target sequence
cuuccauugccauuucagcc

SEQ ID NO: 153 - RNA, 20 nt, Unknown
  Description of Unknown: Target sequence
gccagggaggugggcucggc

SEQ ID NO: 154 - RNA, 20 nt, Unknown
  Description of Unknown: Target sequence
ccacgccagggaggugggcu

SEQ ID NO: 155 - RNA, 20 nt, Unknown
  Description of Unknown: Target sequence
ucuaggccauggugcccucg

SEQ ID NO: 156 - RNA, 20 nt, Unknown
  Description of Unknown: Target sequence
gcuucagggaacucugccac

SEQ ID NO: 157 - RNA, 20 nt, Unknown
  Description of Unknown: Target sequence
ugcuagcucugggcgaugua

SEQ ID NO: 158 - RNA, 20 nt, Unknown
  Description of Unknown: Target sequence
gcaggggcucaugagcaguc

SEQ ID NO: 159 - RNA, 20 nt, Unknown
  Description of Unknown: Target sequence
gaacacauauuuuuauaucc

SEQ ID NO: 160 - RNA, 20 nt, Unknown
  Description of Unknown: Target sequence
augccaccagguucaucaac

SEQ ID NO: 161 - RNA, 20 nt, Unknown
  Description of Unknown: Target sequence
cgcuggacgagaugagguag

SEQ ID NO: 162 - RNA, 20 nt, Unknown
  Description of Unknown: Target sequence
ccccgacgcuggacgagaug

SEQ ID NO: 163 - RNA, 20 nt, Unknown
  Description of Unknown: Target sequence
acgcuggacgagaugaggua

SEQ ID NO: 164 - RNA, 20 nt, Unknown
  Description of Unknown: Target sequence
gugggcauccucacaaucuc

SEQ ID NO: 165 - RNA, 20 nt, Unknown
  Description of Unknown: Target sequence
cugaguggagaucaacgagc

SEQ ID NO: 166 - RNA, 20 nt, Unknown
  Description of Unknown: Target sequence
caacagugaaggaaagccuu

SEQ ID NO: 167 - RNA, 20 nt, Unknown
  Description of Unknown: Target sequence
gcucauugaccuccacucag

SEQ ID NO: 168 - RNA, 20 nt, Unknown
  Description of Unknown: Target sequence
cacucuaucgcgauuuaucu

SEQ ID NO: 169 - RNA, 20 nt, Unknown
  Description of Unknown: Target sequence
cucauccuucucgaaaugca

SEQ ID NO: 170 - RNA, 20 nt, Unknown
  Description of Unknown: Target sequence
cugcagcgcaccagcuucuu

SEQ ID NO: 171 - RNA, 20 nt, Unknown
  Description of Unknown: Target sequence
uaucacuuacggaucacaga

SEQ ID NO: 172 - RNA, 20 nt, Unknown
  Description of Unknown: Target sequence
gggaaccuguacgagucuau

SEQ ID NO: 173 - RNA, 20 nt, Unknown
  Description of Unknown: Target sequence
uacccaaaauguagcuugua

SEQ ID NO: 174 - RNA, 20 nt, Unknown
  Description of Unknown: Target sequence
ugcagcaucccccaauccau

SEQ ID NO: 175 - RNA, 20 nt, Unknown
  Description of Unknown: Target sequence
uuacccacauugcuuccccu

SEQ ID NO: 176 - RNA, 20 nt, Unknown
  Description of Unknown: Target sequence
gcggaagcgggugcgcgugc

SEQ ID NO: 177 - RNA, 20 nt, Unknown
  Description of Unknown: Target sequence
uuggcauuauugagcacucu

SEQ ID NO: 178 - RNA, 20 nt, Unknown
  Description of Unknown: Target sequence
ugaucucuugggagaagaac

SEQ ID NO: 179 - RNA, 20 nt, Unknown
  Description of Unknown: Target sequence
ggcaaggaauacagguauuu

SEQ ID NO: 180 - RNA, 20 nt, Unknown
  Description of Unknown: Target sequence
uccucgccuguccagggauc

SEQ ID NO: 181 - RNA, 20 nt, Unknown
  Description of Unknown: Target sequence
gagcuccaggaccguggcgc

SEQ ID NO: 182 - RNA, 20 nt, Unknown
  Description of Unknown: Target sequence
gcaggaaguccugggucauc

SEQ ID NO: 183 - RNA, 20 nt, Unknown
  Description of Unknown: Target sequence
cgugccccagcugaugaccc

SEQ ID NO: 184 - RNA, 20 nt, Unknown
  Description of Unknown: Target sequence
gcaguaccgcucacagccgc

SEQ ID NO: 185 - RNA, 20 nt, Unknown
  Description of Unknown: Target sequence
gugcaaaugcuauaaugagu

SEQ ID NO: 186 - RNA, 20 nt, Unknown
  Description of Unknown: Target sequence
uaauagcaggucaggcaccg

SEQ ID NO: 187 - RNA, 20 nt, Unknown
  Description of Unknown: Target sequence
auguucauguauuccuuguc

SEQ ID NO: 188 - RNA, 20 nt, Unknown
  Description of Unknown: Target sequence
agcaaaagcaaaaugugauu

SEQ ID NO: 189 - RNA, 20 nt, Unknown
  Description of Unknown: Target sequence
aauggcagcaguugcaagga

SEQ ID NO: 190 - RNA, 20 nt, Unknown
  Description of Unknown: Target sequence
guugucacagguaaauacac

SEQ ID NO: 191 - RNA, 20 nt, Unknown
  Description of Unknown: Target sequence
cauuucacuuuugcucugua

SEQ ID NO: 192 - RNA, 20 nt, Unknown
  Description of Unknown: Target sequence
uugaccaagccacaugucuu

SEQ ID NO: 193 - RNA, 20 nt, Unknown
  Description of Unknown: Target sequence
caccacccacagagagacag

SEQ ID NO: 194 - RNA, 20 nt, Unknown
  Description of Unknown: Target sequence
cggcagcacacccggagcgc

SEQ ID NO: 195 - RNA, 20 nt, Unknown
  Description of Unknown: Target sequence
gaccuaggcgaggcaguagg

SEQ ID NO: 196 - RNA, 20 nt, Unknown
  Description of Unknown: Target sequence
ggaccuaggcgaggcaguag

SEQ ID NO: 197 - RNA, 20 nt, Unknown
  Description of Unknown: Target sequence
aggaccuaggcgaggcagua

SEQ ID NO: 198 - RNA, 20 nt, Unknown
  Description of Unknown: Target sequence
caguauggacacuguccaaa

SEQ ID NO: 199 - RNA, 20 nt, Unknown
  Description of Unknown: Target sequence
ggagaagaugugguuggaca

SEQ ID NO: 200 - RNA, 20 nt, Unknown
  Description of Unknown: Target sequence
ucgccacaguaauagaagau

SEQ ID NO: 201 - RNA, 20 nt, Unknown
  Description of Unknown: Target sequence
uuacccggcagugggggugg

SEQ ID NO: 202 - RNA, 20 nt, Unknown
  Description of Unknown: Target sequence
uacaggaggcucuaggguaa

SEQ ID NO: 203 - RNA, 20 nt, Unknown
  Description of Unknown: Target sequence
aggcucuaggguaaggacaa

SEQ ID NO: 204 - RNA, 20 nt, Unknown
  Description of Unknown: Target sequence
aacgacccggacgcaguggc

SEQ ID NO: 205 - RNA, 20 nt, Unknown
  Description of Unknown: Target sequence
cgacccggacgcaguggcac

SEQ ID NO: 206 - RNA, 20 nt, Unknown
  Description of Unknown: Target sequence
gaugaucacgccuguggcug

SEQ ID NO: 207 - RNA, 20 nt, Unknown
  Description of Unknown: Target sequence
gugccagaucacgugauacu

SEQ ID NO: 208 - RNA, 20 nt, Unknown
  Description of Unknown: Target sequence
auucaccaagagggccuaaa

SEQ ID NO: 209 - RNA, 20 nt, Unknown
  Description of Unknown: Target sequence
cccaucagaguguaaguucu

SEQ ID NO: 210 - RNA, 20 nt, Unknown
  Description of Unknown: Target sequence
ccccuccaugucuggguacu

SEQ ID NO: 211 - RNA, 20 nt, Unknown
  Description of Unknown: Target sequence
gcacacggaggagcuggagc

SEQ ID NO: 212 - RNA, 20 nt, Unknown
  Description of Unknown: Target sequence
gugaauguguuguugauggc

SEQ ID NO: 213 - RNA, 20 nt, Unknown
  Description of Unknown: Target sequence
uuggugguaaggcccugggc

SEQ ID NO: 214 - RNA, 20 nt, Unknown
  Description of Unknown: Target sequence
ugguaaggcccugggcaggu

SEQ ID NO: 215 - RNA, 20 nt, Unknown
  Description of Unknown: Target sequence
acuccuaaggagaagucugc

SEQ ID NO: 216 - RNA, 20 nt, Unknown
  Description of Unknown: Target sequence
gccagguguugagguuuccc

SEQ ID NO: 217 - RNA, 20 nt, Unknown
  Description of Unknown: Target sequence
aucacaucucaagcaagacg

SEQ ID NO: 218 - RNA, 20 nt, Unknown
  Description of Unknown: Target sequence
uucaugggguccuuuucacc

SEQ ID NO: 219 - RNA, 20 nt, Unknown
  Description of Unknown: Target sequence
uucucaccugccuccggaag

SEQ ID NO: 220 - RNA, 20 nt, Unknown
  Description of Unknown: Target sequence
cugcuagucccagcugagga

SEQ ID NO: 221 - RNA, 20 nt, Unknown
  Description of Unknown: Target sequence
accaaccugaagaagaaccg

SEQ ID NO: 222 - RNA, 20 nt, Unknown
  Description of Unknown: Target sequence
uuuuccaaagauugcccacu

SEQ ID NO: 223 - RNA, 20 nt, Unknown
  Description of Unknown: Target sequence
caaaauccuaaugauagauu

SEQ ID NO: 224 - RNA, 20 nt, Unknown
  Description of Unknown: Target sequence
acuacagcauugcucaguac

SEQ ID NO: 225 - RNA, 20 nt, Unknown
  Description of Unknown: Target sequence
cucucacaggaagaggcucc

SEQ ID NO: 226 - RNA, 20 nt, Unknown
  Description of Unknown: Target sequence
cacgaaagagcagcuuugcg

SEQ ID NO: 227 - RNA, 20 nt, Unknown
  Description of Unknown: Target sequence
gacuucacgcggcccagacg

SEQ ID NO: 228 - RNA, 20 nt, Unknown
  Description of Unknown: Target sequence
aagggccaagguauuguggc

SEQ ID NO: 229 - RNA, 20 nt, Unknown
  Description of Unknown: Target sequence
acacugaaucuagaccuucu

SEQ ID NO: 230 - RNA, 20 nt, Unknown
  Description of Unknown: Target sequence
cuuccaagucuuccacugca

SEQ ID NO: 231 - RNA, 20 nt, Unknown
  Description of Unknown: Target sequence
uggugguucaccucucauuc

SEQ ID NO: 232 - RNA, 21 nt, Unknown
  Description of Unknown: Target sequence
ugguggugguucaccucucau

SEQ ID NO: 233 - RNA, 20 nt, Unknown
  Description of Unknown: Target sequence
uucaccucucauucagauuu

SEQ ID NO: 234 - RNA, 20 nt, Unknown
  Description of Unknown: Target sequence
aaagaucauggaucagucua

SEQ ID NO: 235 - RNA, 20 nt, Unknown
  Description of Unknown: Target sequence
cagccaaagauuguccucaa

SEQ ID NO: 236 - RNA, 20 nt, Unknown
  Description of Unknown: Target sequence
uccccaagguccaagcucaa

SEQ ID NO: 237 - RNA, 20 nt, Unknown
  Description of Unknown: Target sequence
caccaagaccgacguuaaga

SEQ ID NO: 238 - RNA, 20 nt, Unknown
  Description of Unknown: Target sequence
uucccagcacguagccgcca

SEQ ID NO: 239 - RNA, 20 nt, Unknown
  Description of Unknown: Target sequence
cucagcuuguuccacugacu

SEQ ID NO: 240 - RNA, 20 nt, Unknown
  Description of Unknown: Target sequence
gugcacaacugcgucaauau

SEQ ID NO: 241 - RNA, 20 nt, Unknown
  Description of Unknown: Target sequence
accuucauggggucuugaac

SEQ ID NO: 242 - RNA, 20 nt, Unknown
  Description of Unknown: Target sequence
gggccugcgcaccucguggu

SEQ ID NO: 243 - RNA, 20 nt, Unknown
  Description of Unknown: Target sequence
gucuuaggccagggccaccu

SEQ ID NO: 244 - RNA, 20 nt, Unknown
  Description of Unknown: Target sequence
uaggccagggccaccuggcu

SEQ ID NO: 245 - RNA, 20 nt, Unknown
  Description of Unknown: Target sequence
aaucaacuacuacacgcuca

SEQ ID NO: 246 - RNA, 20 nt, Unknown
  Description of Unknown: Target sequence
ucaagauuuuuucuucuuuu

SEQ ID NO: 247 - RNA, 20 nt, Unknown
  Description of Unknown: Target sequence
acaucaaaggagacugccgg

SEQ ID NO: 248 - RNA, 20 nt, Unknown
  Description of Unknown: Target sequence
gcgcagcaccuguaccuccg

SEQ ID NO: 249 - RNA, 20 nt, Unknown
  Description of Unknown: Target sequence
cuguugagccaggccuuguu

SEQ ID NO: 250 - RNA, 20 nt, Unknown
  Description of Unknown: Target sequence
augucacagcaccccugggu

SEQ ID NO: 251 - RNA, 20 nt, Unknown
  Description of Unknown: Target sequence
gacaagaaagggacugaagc

SEQ ID NO: 252 - RNA, 20 nt, Unknown
  Description of Unknown: Target sequence
aucgacaagaaagggacuga

SEQ ID NO: 253 - RNA, 20 nt, Unknown
  Description of Unknown: Target sequence
acacaccgguugguggccuc

SEQ ID NO: 254 - RNA, 20 nt, Unknown
  Description of Unknown: Target sequence
ggcgcagcugggagagcagc

SEQ ID NO: 255 - RNA, 20 nt, Unknown
  Description of Unknown: Target sequence
caccugugaggaaguuccug

SEQ ID NO: 256 - RNA, 20 nt, Unknown
  Description of Unknown: Target sequence
ugacaacagguaagcuccau

SEQ ID NO: 257 - RNA, 20 nt, Unknown
  Description of Unknown: Target sequence
cgaccuucgucgccauaacu

SEQ ID NO: 258 - RNA, 20 nt, Unknown
  Description of Unknown: Target sequence
caugaacacggaauccaugc

SEQ ID NO: 259 - RNA, 20 nt, Unknown
  Description of Unknown: Target sequence
uaaaagacugacugaaggcc

SEQ ID NO: 260 - RNA, 20 nt, Unknown
  Description of Unknown: Target sequence
ucauguauaaaaacacacuc

SEQ ID NO: 261 - RNA, 20 nt, Unknown
  Description of Unknown: Target sequence
ggccaugcauguguucagaa

SEQ ID NO: 262 - RNA, 20 nt, Unknown
  Description of Unknown: Target sequence
ccagguagaauaugaucagc

SEQ ID NO: 263 - RNA, 20 nt, Unknown
  Description of Unknown: Target sequence
ggauugaagaauuuguucac

SEQ ID NO: 264 - RNA, 20 nt, Unknown
  Description of Unknown: Target sequence
aacugaugaagauaauuugu

SEQ ID NO: 265 - RNA, 20 nt, Unknown
  Description of Unknown: Target sequence
ucacuuagggccuacaguac

SEQ ID NO: 266 - RNA, 20 nt, Unknown
  Description of Unknown: Target sequence
gggaugagugugguguuccu

SEQ ID NO: 267 - RNA, 20 nt, Unknown
  Description of Unknown: Target sequence
cgaccagauaggaaccaccc

SEQ ID NO: 268 - protein, 7 aa, Artificial Sequence
  Description of Artificial Sequence: Synthetic peptide
RNEHLEV

SEQ ID NO: 269 - protein, 7 aa, Artificial Sequence
  Description of Artificial Sequence: Synthetic peptide
QSTTLKR

SEQ ID NO: 270 - protein, 7 aa, Artificial Sequence
  Description of Artificial Sequence: Synthetic peptide
RTEHLAR

SEQ ID NO: 271 - protein, 7 aa, Artificial Sequence
  Description of Artificial Sequence: Synthetic peptide
RGEHLRQ

SEQ ID NO: 272 - protein, 7 aa, Artificial Sequence
  Description of Artificial Sequence: Synthetic peptide
QSGTLKR

SEQ ID NO: 273 - protein, 7 aa, Artificial Sequence
  Description of Artificial Sequence: Synthetic peptide
RNDKLVP

SEQ ID NO: 274 - protein, 1544 aa, Artificial Sequence
  Description of Artificial Sequence: Synthetic polypeptide
MPKKKRKVSEVEFSHEYWMRHALTLAKRAWDEREVPVGAVLVHNNRVIGEGWNRPIGRHDPTAHAEIMALRQGGLVMQNYRLIDATLYVTLEPCVMCAGAMIHSRIGRVVFGARDAKTGAAGSLMDVLHHPGMNHRVEITEGILADECAALLSDFFRMRRQEIKAQKKAQSSTDSGGSSGGSSGSETPGTSESATPESSGGSSGGSSEVEFSHEYWMRHALTLAKRARDEREVPVGAVLVLNNRVIGEGWNRAIGLHDPTAHAEIMALRQGGLVMQNYRLIDATLYVTFEPCVMCAGAMIHSRIGRVVFGVRNAKTGAAGSLMDVLHYPGMNHRVEITEGILADECAALLCYFFRMPRQVFNAQKKAQSSTDSGGSSGGSSGSETPGTSESATPESDLVLGLAIGIGSVGVGILNKVTGEIIHKNSRIFPAAQAENNLVRRTNRQGRRLARRKKHRRVRLNRLFEESGLITDFTKISINLNPYQLRVKGLTDELSNEELFIALKNMVKHRGISYLDDASDDGNSSVGDYAQIVKENSKQLETKTPGQIQLERYQTYGQLRGDFTVEKDGKKHRLINVFPTSAYRSEALRILQTQQEFNPQITDEFINRYLEILTGKRKYYHGPGNEKSRTDYGRYRTSGETLDNIFGILIGKCTFYPDEFRAAKASYTAQEFNLLNDLNNLTVPTETKKLSKEQKNQIINYVKNEKAMGPAKLFKYIAKLLSCDVADIKGYRIDKSGKAEIHTFEAYRKMKTLETLDIEQMDRETLDKLAYVLTLNTEREGIQEALEHEFADGSFSQKQVDELVQFRKANSSIFGKGWHNFSVKLMMELIPELYETSEEQMTILTRLGKQKTTSSSNKTKYIDEKLLTEEIYNPVVAKSVRQAIKIVNAAIKEYGDFDNIVIEMARETNEDDEKKAIQKIQKANKDEKDAAMLKAANQYNGKAELPHSVFHGHKQLATKIRLWHQQGERCLYTGKTISIHDLINNSNQFEVDHILPLSITFDDSLANKVLVYATANQEKGQRTPYQALDSMDDAWSFRELKAFVRESKTLSNKKKEYLLTEEDISKFDVRKKFIERNLVDTLYASRVVLNALQEHFRAHKIDTKVSVVRGQFTSQLRRHWGIEKTRDTYHHHAVDALIIAASSQLNLWKKQKNTLVSYSEDQLLDIETGELISDDEYKESVFKAPYQHFVDTLKSKEFEDSILFSYQVDSKFNRKISDATIYATRQAKVGKDKADETYVLGKIKDIYTQDGYDAFMKIYKKDKSKFLMYRHDPQTFEKVIEPILENYPNKQINDKGKEVPCNPFLKYKEEHGYIRKYSKKGNGPEIKSLKYYDSKLGNHIDITPKDSNNKVVLQSVSPWRADVYFNKTTGKYEILGLKYADLQFDKGTGTYKISQEKYNDIKKKEGVDSDSEFKFTLYKNDLLLVKDTETKEQQLFRFLSRTMPKQKHYVELKPYDKQKFEGGEALIKVLGNVANSGQCKKGLGKSNISIYKVRTDVLGNQHIIKNEGDKPKLDFPKKKRKVEGADKRTADGSEFESPKKKRKV

SEQ ID NO: 275 - protein, 1471 aa, Artificial Sequence
  Description of Artificial Sequence: Synthetic polypeptide
MSEVEFSHEYWMRHALTLAKRAWDEREVPVGAVLVHNNRVIGEGWNRPIGRHDPTAHAEIMALRQGGLVMQNYRLIDATLYVTLEPCVMCAGAMIHSRIGRVVFGARDAKTGAAGSLMDVLHHPGMNHRVEITEGILADECAALLSDFFRMRRQEIKAQKKAQSSTDSGGSSGGSSGSETPGTSESATPESSGGSSGGSSEVEFSHEYWMRHALTLAKRARDEREVPVGAVLVLNNRVIGEGWNRAIGLHDPTAHAEIMALRQGGLVMQNYRLIDATLYVTFEPCVMCAGAMIHSRIGRVVFGVRNAKTGAAGSLMDVLHYPGMNHRVEITEGILADECAALLCYFFRMPRQVFNAQKKAQSSTDSGGSSGGSSGSETPGTSESATPESSGGSSGGSKRNYILGLAIGITSVGYGIIDYETRDVIDAGVRLFKEANVENNEGRRSKRGARRLKRRRRHRIQRVKKLLFDYNLLTDHSELSGINPYEARVKGLSQKLSEEEFSAALLHLAKRRGVHNVNEVEEDTGNELSTKEQISRNSKALEEKYVAELQLERLKKDGEVRGSINRFKTSDYVKEAKQLLKVQKAYHQLDQSFIDTYIDLLETRRTYYEGPGEGSPFGWKDIKEWYEMLMGHCTYFPEELRSVKYAYNADLYNALNDLNNLVITRDENEKLEYYEKFQIIENVFKQKKKPTLKQIAKEILVNEEDIKGYRVTSTGKPEFTNLKVYHDIKDITARKEIIENAELLDQIAKILTIYQSSEDIQEELTNLNSELTQEEIEQISNLKGYTGTHNLSLKAINLILDELWHTNDNQIAIFNRLKLVPKKVDLSQQKEIPTTLVDDFILSPVVKRSFIQSIKVINAIIKKYGLPNDIIIELAREKNSKDAQKMINEMQKRNRQTNERIEEIIRTTGKENAKYLIEKIKLHDMQEGKCLYSLEAIPLEDLLNNPFNYEVDHIIPRSVSFDNSFNNKVLVKQEENSKKGNRTPFQYLSSSDSKISYETFKKHILNLAKGKGRISKTKKEYLLEERDINRFSVQKDFINRNLVDTRYATRGLMNLLRSYFRVNNLDVKVKSINGGFTSFLRRKWKFKKERNKGYKHHAEDALIIANADFIFKEWKKLDKAKKVMENQMFEEKQAESMPEIETEQEYKEIFITPHQIKHIKDFKDYKYSHRVDKKPNRKLINDTLYSTRKDDKGNTLIVNNLNGLYDKDNDKLKKLINKSPEKLLMYHHDPQTYQKLKLIMEQYGDEKNPLYKYYEETGNYLTKYSKKDNGPVIKKIKYYGNKLNAHLDITDDYPNSRNKVVKLSLKPYRFDVYLDNGVYKFVTVKNLDVIKKENYYEVNSKCYEEAKKLKKISNQAEFIASFYKNDLIKINGELYRVIGVNNDLLNRIEVNMIDITYREYLENMNDKRPPHIIKTIASKTQSIKKYSTDILGNLYEVKSKKHPQIIKKGEGADKRTADGSEFESPKKKRKV

SEQ ID NO: 276 - protein, 1591 aa, Artificial Sequence
  Description of Artificial Sequence: Synthetic polypeptide
MSEVEFSHEYWMRHALTLAKRAWDEREVPVGAVLVHNNRVIGEGWNRPIGRHDPTAHAEIMALRQGGLVMQNYRLIDATLYVTLEPCVMCAGAMIHSRIGRVVFGARDAKTGAAGSLMDVLHHPGMNHRVEITEGILADECAALLSDFFRMRRQEIKAQKKAQSSTDSGGSSGGSSGSETPGTSESATPESSGGSSGGSSEVEFSHEYWMRHALTLAKRARDEREVPVGAVLVLNNRVIGEGWNRAIGLHDPTAHAEIMALRQGGLVMQNYRLIDATLYVTFEPCVMCAGAMIHSRIGRVVFGVRNAKTGAAGSLMDVLHYPGMNHRVEITEGILADECAALLCYFFRMPRQVFNAQKKAQSSTDSGGSSGGSSGSETPGTSESATPESSGGSSGGSKRNYILGLAIGITSVGYGIIDYETRDVIDAGVRLFKEANVENNEGRRSKRGARRLKRRRRHRIQRVKKLLFDYNLLTDHSELSGINPYEARVKGLSQKLSEEEFSAALLHLAKRRGVHNVNEVEEDTGNELSTKEQISRNSKALEEKYVAELQLERLKKDGEVRGSINRFKTSDYVKEAKQLLKVQKAYHQLDQSFIDTYIDLLETRRTYYEGPGEGSPFGWKDIKEWYEMLMGHCTYFPEELRSVKYAYNADLYNALNDLNNLVITRDENEKLEYYEKFQIIENVFKQKKKPTLKQIAKEILVNEEDIKGYRVTSTGKPEFTNLKVYHDIKDITARKEIIENAELLDQIAKILTIYQSSEDIQEELTNLNSELTQEEIEQISNLKGYTGTHNLSLKAINLILDELWHTNDNQIAIFNRLKLVPKKVDLSQQKEIPTTLVDDFILSPVVKRSFIQSIKVINAIIKKYGLPNDIIIELAREKNSKDAQKMINEMQKRNRQTNERIEEIIRTTGKENAKYLIEKIKLHDMQEGKCLYSLEAIPLEDLLNNPFNYEVDHIIPRSVSFDNSFNNKVLVKQEENSKKGNRTPFQYLSSSDSKISYETFKKHILNLAKGKGRISKTKKEYLLEERDINRFSVQKDFINRNLVDTRYATRGLMNLLRSYFRVNNLDVKVKSINGGFTSFLRRKWKFKKERNKGYKHHAEDALIIANADFIFKEWKKLDKAKKVMENQMFEEKQAESMPEIETEQEYKEIFITPHQIKHIKDFKDYKYSHRVDKKPNRKLINDTLYSTRKDDKGNTLIVNNLNGLYDKDNDKLKKLINKSPEKLLMYHHDPQTYQKLKLIMEQYGDEKNPLYKYYEETGNYLTKYSKKDNGPVIKKIKYYGNKLNAHLDITDDYPNSRNKVVKLSLKPYRFDVYLDNGVYKFVTVKNLDVIKKENYYEVNSKCYEEAKKLKKISNQAEFIASFYKNDLIKINGELYRVIGVNNDLLNRIEVNMIDITYREYLENMNDKRPPHIIKTIASKTQSIKKYSTDILGNLYEVKSKKHPQIIKKGEGADKRTADGSEFESPKKKRKVSSGNSNANSRGPSFSSGLVPLSLRGSHSRPGERPFQCRICMRNFSRNEHLEVHTRTHTGEKPFQCRICMRNFSQSTTLKRHLRTHTGEKPFQCRICMRNFSRTEHLARHLKTHLRGSSAQ

SEQ ID NO: 277 - protein, 1591 aa, Artificial Sequence
  Description of Artificial Sequence: Synthetic polypeptide
MSEVEFSHEYWMRHALTLAKRAWDEREVPVGAVLVHNNRVIGEGWNRPIGRHDPTAHAEIMALRQGGLVMQNYRLIDATLYVTLEPCVMCAGAMIHSRIGRVVFGARDAKTGAAGSLMDVLHHPGMNHRVEITEGILADECAALLSDFFRMRRQEIKAQKKAQSSTDSGGSSGGSSGSETPGTSESATPESSGGSSGGSSEVEFSHEYWMRHALTLAKRARDEREVPVGAVLVLNNRVIGEGWNRAIGLHDPTAHAEIMALRQGGLVMQNYRLIDATLYVTFEPCVMCAGAMIHSRIGRVVFGVRNAKTGAAGSLMDVLHYPGMNHRVEITEGILADECAALLCYFFRMPRQVFNAQKKAQSSTDSGGSSGGSSGSETPGTSESATPESSGGSSGGSKRNYILGLAIGITSVGYGIIDYETRDVIDAGVRLFKEANVENNEGRRSKRGARRLKRRRRHRIQRVKKLLFDYNLLTDHSELSGINPYEARVKGLSQKLSEEEFSAALLHLAKRRGVHNVNEVEEDTGNELSTKEQISRNSKALEEKYVAELQLERLKKDGEVRGSINRFKTSDYVKEAKQLLKVQKAYHQLDQSFIDTYIDLLETRRTYYEGPGEGSPFGWKDIKEWYEMLMGHCTYFPEELRSVKYAYNADLYNALNDLNNLVITRDENEKLEYYEKFQIIENVFKQKKKPTLKQIAKEILVNEEDIKGYRVTSTGKPEFTNLKVYHDIKDITARKEIIENAELLDQIAKILTIYQSSEDIQEELTNLNSELTQEEIEQISNLKGYTGTHNLSLKAINLILDELWHTNDNQIAIFNRLKLVPKKVDLSQQKEIPTTLVDDFILSPVVKRSFIQSIKVINAIIKKYGLPNDIIIELAREKNSKDAQKMINEMQKRNRQTNERIEEIIRTTGKENAKYLIEKIKLHDMQEGKCLYSLEAIPLEDLLNNPFNYEVDHIIPRSVSFDNSFNNKVLVKQEENSKKGNRTPFQYLSSSDSKISYETFKKHILNLAKGKGRISKTKKEYLLEERDINRFSVQKDFINRNLVDTRYATRGLMNLLRSYFRVNNLDVKVKSINGGFTSFLRRKWKFKKERNKGYKHHAEDALIIANADFIFKEWKKLDKAKKVMENQMFEEKQAESMPEIETEQEYKEIFITPHQIKHIKDFKDYKYSHRVDKKPNRKLINDTLYSTRKDDKGNTLIVNNLNGLYDKDNDKLKKLINKSPEKLLMYHHDPQTYQKLKLIMEQYGDEKNPLYKYYEETGNYLTKYSKKDNGPVIKKIKYYGNKLNAHLDITDDYPNSRNKVVKLSLKPYRFDVYLDNGVYKFVTVKNLDVIKKENYYEVNSKCYEEAKKLKKISNQAEFIASFYKNDLIKINGELYRVIGVNNDLLNRIEVNMIDITYREYLENMNDKRPPHIIKTIASKTQSIKKYSTDILGNLYEVKSKKHPQIIKKGEGADKRTADGSEFESPKKKRKVSSGNSNANSRGPSFSSGLVPLSLRGSHSRPGERPFQCRICMRNFSRGEHLRQHTRTHTGEKPFQCRICMRNFSQSGTLKRHLRTHTGEKPFQCRICMRNFSRNDKLVPHLKTHLRGSSAQ

SEQ ID NO: 278 - DNA, 20 bp, Unknown
  Description of Unknown: Target sequence
gacaagaaagggactgaagc

SEQ ID NO: 279 - DNA, 20 bp, Unknown
  Description of Unknown: Target sequence
atcgacaagaaagggactga

SEQ ID NO: 280 - DNA, 20 bp, Unknown
  Description of Unknown: Target sequence
acacaccggttggtggcctc

SEQ ID NO: 281 - protein, 1786 aa, Artificial Sequence
  Description of Artificial Sequence: Synthetic polypeptide
MSEVEFSHEYWMRHALTLAKRAWDEREVPVGAVLVHNNRVIGEGWNRPIGRHDPTAHAEIMALRQGGLVMQNYRLIDATLYVTLEPCVMCAGAMIHSRIGRVVFGARDAKTGAAGSLMDVLHHPGMNHRVEITEGILADECAALLSDFFRMRRQEIKAQKKAQSSTDSGGSSGGSSGSETPGTSESATPESSGGSSGGSSEVEFSHEYWMRHALTLAKRARDEREVPVGAVLVLNNRVIGEGWNRAIGLHDPTAHAEIMALRQGGLVMQNYRLIDATLYVTFEPCVMCAGAMIHSRIGRVVFGVRNAKTGAAGSLMDVLHYPGMNHRVEITEGILADECAALLCYFFRMPRQVFNAQKKAQSSTDSGGSSGGSSGSETPGTSESATPESSGGSSGGSDKKYSIGLAIGTNSVGWAVITDEYKVPSKKFKVLGNTDRHSIKKNLIGALLFDSGETAEATRLKRTARRRYTRRKNRICYLQEIFSNEMAKVDDSFFHRLEESFLVEEDKKHERHPIFGNIVDEVAYHEKYPTIYHLRKKLVDSTDKADLRLIYLALAHMIKFRGHFLIEGDLNPDNSDVDKLFIQLVQTYNQLFEENPINASGVDAKAILSARLSKSRRLENLIAQLPGEKKNGLFGNLIALSLGLTPNFKSNFDLAEDAKLQLSKDTYDDDLDNLLAQIGDQYADLFLAAKNLSDAILLSDILRVNTEITKAPLSASMIKRYDEHHQDLTLLKALVRQQLPEKYKEIFFDQSKNGYAGYIDGGASQEEFYKFIKPILEKMDGTEELLVKLNREDLLRKQRTFDNGSIPHQIHLGELHAILRRQEDFYPFLKDNREKIEKILTFRIPYYVGPLARGNSRFAWMTRKSEETITPWNFEEVVDKGASAQSFIERMTNFDKNLPNEKVLPKHSLLYEYFTVYNELTKVKYVTEGMRKPAFLSGEQKKAIVDLLFKTNRKVTVKQLKEDYFKKIECFDSVEISGVEDRFNASLGTYHDLLKIIKDKDFLDNEENEDILEDIVLTLTLFEDREMIEERLKTYAHLFDDKVMKQLKRRRYTGWGRLSRKLINGIRDKQSGKTILDFLKSDGFANRNFMQLIHDDSLTFKEDIQKAQVSGQGDSLHEHIANLAGSPAIKKGILQTVKVVDELVKVMGRHKPENIVIEMARENQTTQKGQKNSRERMKRIEEGIKELGSQILKEHPVENTQLQNEKLYLYYLQNGRDMYVDQELDINRLSDYDVDHIVPQSFLKDDSIDNKVLTRSDKNRGKSDNVPSEEVVKKMKNYWRQLLNAKLITQRKFDNLTKAERGGLSELDKAGFIKRQLVETRQITKHVAQILDSRMNTKYDENDKLIREVKVITLKSKLVSDFRKDFQFYKVREINNYHHAHDAYLNAVVGTALIKKYPKLESEFVYGDYKVYDVRKMIAKSEQEIGKATAKYFFYSNIMNFFKTEITLANGEIRKRPLIETNGETGEIVWDKGRDFATVRKVLSMPQVNIVKKTEVQTGGFSKESILPKRNSDKLIARKKDWDPKKYGGFMQPTVAYSVLVVAKVEKGKSKKLKSVKELLGITIMERSSFEKNPIDFLEAKGYKEVKKDLIIKLPKYSLFELENGRKRMLASAKFLQKGNELALPSKYVNFLYLASHYEKLKGSPEDNEQKQLFVEQHKHYLDEIIEQISEFSKRVILADANLDKVLSAYNKHRDKPIREQAENIIHLFTLTNLGAPRAFKYFDTTIARKEYRSTKEVLDATLIHQSITGLYETRIDLSQLGGDEGADKRTADGSEFESPKKKRKV

SEQ ID NO: 282 - DNA, 20 bp, Artificial Sequence
  Description of Artificial Sequence: Synthetic oligonucleotide
gctctaggccgaagtgtcgc

SEQ ID NO: 283 - DNA, 20 bp, Artificial Sequence
  Description of Artificial Sequence: Synthetic oligonucleotide
tcactggggtggatcccgaa

SEQ ID NO: 284 - DNA, 20 bp, Artificial Sequence
  Description of Artificial Sequence: Synthetic oligonucleotide
gtgggcatcctcacaatctc

SEQ ID NO: 285 - DNA, 20 bp, Artificial Sequence
  Description of Artificial Sequence: Synthetic oligonucleotide
ggacctaggcgaggcagtag

SEQ ID NO: 286 - DNA, 20 bp, Artificial Sequence
  Description of Artificial Sequence: Synthetic oligonucleotide
gacctaggcgaggcagtagg

SEQ ID NO: 287 - DNA, 20 bp, Artificial Sequence
  Description of Artificial Sequence: Synthetic oligonucleotide
cagtatggacactgtccaaa

SEQ ID NO: 288 - DNA, 20 bp, Artificial Sequence
  Description of Artificial Sequence: Synthetic oligonucleotide
atcgacaagaaagggactga

SEQ ID NO: 289 - protein, 1786 aa, Artificial Sequence; identical to SEQ ID NO: 281
  Description of Artificial Sequence: Synthetic polypeptide

SEQ ID NO: 290 - DNA, 20 bp, Artificial Sequence
  Description of Artificial Sequence: Synthetic oligonucleotide
gacctaggcgaggcagtagg

SEQ ID NO: 291 - protein, 643 aa, Mus musculus
MRPPRPSSAMLTFFAAFLAAPLALAESPYLVRVDAARPLRPLLPFWRSTGFCPPLPHDQADQYDLSWDQQLNLAYIGAVPHSGIEQVRIHWLLDLITARKSPGQGLMYNFTHLDAFLDLLMENQLLPGFELMGSPSGYFTDFDDKQQVFEWKDLVSLLARRYIGRYGLTHVSKWNFETWNEPDHHDFDNVSMTTQGFLNYYDACSEGLRIASPTLKLGGPGDSFHPLPRSPMCWSLLGHCANGTNFFTGEVGVRLDYISLHKKGAGSSIAILEQEMAVVEQVQQLFPEFKDTPIYNDEADPLVGWSLPQPWRADVTYAALVVKVIAQHQNLLFANSSSSMRYVLLSNDNAFLSYHPYPFSQRTLTARFQVNNTHPPHVQLLRKPVLTVMGLMALLDGEQLWAEVSKAGAVLDSNHTVGVLASTHHPEGSAAAWSTTVLIYTSDDTHAHPNHSIPVTLRLRGVPPGLDLVYIVLYLDNQLSSPYSAWQHMGQPVFPSAEQFRRMRMVEDPVAEAPRPFPARGRLTLHRKLPVPSLLLVHVCTRPLKPPGQVSRLRALPLTHGQLILVWSDERVGSKCLWTYEIQFSQKGEEYAPINRRPSTFNLFVFSPDTAVVSGSYRVRALDYWARPGPFSDPVTYLDVPAS

SEQ ID NO: 292 - DNA, 4420 bp, Mus musculus
ctctgtgcccacccactgccaagagggacaggtctcaaaggtcagggcagtgtcccgggaaggagggcatcggctcctgggagcggccttaggacgcggggtggactctcaccatcgcacaggaagccagccagtccccagatgaagtccgagcagaggtggcagaagagcacctacaggcctccagcgagaccgagacagccgcaagaataatggccgctctgagacacccaagcactgctaatgttggttccatttttggagcgcctgggacgcagcggaactcgccagcacggggcggcgcgtgactgggttcctttttgtcccggcctggcgagaggtcacgtggggcgttacgcagaggcggaacactgcgaccgccgcctaaaaagcttgctgtttaggggcacctggatatcccaaccatgcgacccccgcgtccctcctcagctatgctgacgttttttgctgcgttcttggccgcgcccttggcgctggctgagtcaccgtacctggtgcgtgtggacgcagcccgcccgctgaggcctctgttgcccttctggaggagcaccggcttctgccccccactgcctcacgaccaggctgaccagtacgaccttagttgggaccagcaactgaaccttgcctacataggtgccgtacctcacagtggcattgagcaggtccggatacactggctgctggatctcatcacagccaggaagtcacctgggcagggacttatgtacaacttcacccacttggatgcattcttggaccttctcatggagaaccagcttctccctggatttgagctcatgggcagtccttctgggtacttcacggactttgatgacaagcagcaggtgtttgaatggaaggacctggtttctctcttggccaggagatacattggtaggtatgggctgacacacgtttccaagtggaactttgagacttggaatgaaccagaccaccatgactttgacaacgtgtccatgaccacacaaggcttcctgaattactatgatgcctgctctgaggggctgcgcattgccagccccactttgaagttgggtggtcctggggattccttccaccccctgccaaggtcaccaatgtgctggagcctcctgggtcactgtgccaatggaaccaacttcttcactggcgaggtgggcgtgcgtctggattacatctccctgcacaagaagggtgcaggtagctccatcgccatcctggagcaggagatggcagttgtggagcaggtccagcagctcttccctgagttcaaggatacccctatttacaatgacgaggcagaccctctggtgggctggtccctgccacaaccttggagagctgatgtgacttatgcggccctggtggtgaaggtcattgcacagcaccagaacctgctgtttgccaacagcagttcctccatgcgctatgtgctcctcagcaatgacaatgccttcctgagctaccacccgtaccctttctcccagcgcacacttactgctcgattccaggtcaacaatactcacccaccccacgtgcagttgctgcgaaagccagtactcacagtcatggggctcatggccctgttggatggagaacaactctgggcagaggtctcaaaggctggggctgtgttggacagcaatcatacagtgggtgtcctggccagcacccatcaccctgaaggctccgcagcggcctggagtaccacagtcctcatctacactagtgatgacacccacgcacaccccaaccacagtatccctgtgactcttcgcctgcgtggggtacctcctggcttggatcttgtctacatagtactctacttagacaatcaactcagcagcccctacagtgcgtggcagcacatgggccagccagtcttcccctctgcagagcagttccgacgtatgcgcatggtggaggaccccgtggctgaggcaccacgcccctttcctgctaggggccgcctgaccctacaccggaagcttccggtgccatcactcctgctggtgcatgtatgcacacgccccttgaagccacctgggcaggtcagccggctccgtgcactgcccctgacacatggacagctgattttggtctggtcagatgagcgtgtgggctccaagtgcctgtggacatatgagatccagttttcccagaaaggtgaagagtatgccccaatcaacaggaggccgtctacttttaacctctttgtgttcagcccagacacagctgtggtctctggctcctaccgagttcgagcattggattactgggcccggccaggccccttctccgaccctgtgacttacctggatgtccctgcctcatgagagccactggctcctagtgacttgtgaatctgtgctgactggtgaatggagtcaaccagtatgagctagactgccattagctaggcagctgactgtcagcttctattgttcttcccctatttccctttaaagtgtctttctctacctcagacttagggtcagtctttgtggctaagcactttataggcccagttggagtgacctttgcccaccttcctccccatgcccagctgttcaaaaagtttaaatgtgggactggaaagatggctcagtagataaagtgcttgctgtgcaggcccagggacttgtgttcagatatctagcactcatgtataggctgggcatggcaatatatgcctattgtcctagtgttggtggaagggacagagacaggccagggttccctggccttccagtctacctgaaactgcaagctccaggttcagtaagaaaccctgttttagaaaaatcaagtagagtgcttggtacacacacacacacacacacacagagtctaaatttagtttcttgagcttctgtaatatcaaaaatgaagttatgtacttctgaaatacaatactgcacagagtaagcatcttcattccaacaggaaaaagaaatgacagggaaggatttaagtgaaacaagaccaaagcatagcaagacaaacgttaaatcctgcagctccattctcagcatcggggcccatgatcctgtgatgtgctggacagtctgtgtctgtggtgttgccatttccagccgccatgacctttctcctaggctggtgtcttgggcttcctattgattcgataaaccgcgatgaatgagcagaagcatctgggtagggaagcgttgacttcacttgtattcctacattacagtctatcatcgaaggcagtcaggcaggcacctggaggcaggaagtcatggagaggccatggaggggtgctgcttactcagactatgatcttacacatcccgggatcaccagccaaagggtgggcccccacccacaacggtctggaccctcccacatcaatcactagtttaagaaaacaggcttatctataggtcaatcttgttggggcatttttctcaattgaggttccttcttcccaaatgactctagcttgtaataaactgaaataaagccaccccaatcttgccacacattacctggcctcccaagtcttcctttgaaatctgggtggaagccaacataaccctgtcactgtaactctgatattctaccttctaagccagcatcctgtggatcacagcctactatcagcttgagtggtagttgaggactcctgggtcatccatggctacaataagcatgaagtgcctgaggcttagtcccatgcatttgtggagaatattatgatgatgatatctagtagaggggggaggctgttcacctcaaagggaacaggaagtagagtggggatagaattaagctaaatacttcttcactgacccgctttgtttaactcagccctgcatcctaaagtttctagaatctccccaaacagacctattacctggaaactacctttaaggtgtaagcctgggctgatcttaataggctgatgttcctaccttggttctggccacgggaagaaccctctctcctttagtacaaacccctggtgtgccccaccagagagcctgttggacacacgtgtccttaattcattctgcacatttttcttctctccatcagcacacagaagttcagcatacagaggtttgtgctgaaatgtaggcgtactcccaagctctccccagagtactatcacctactgtccaggaaatgagtctgagtgcagtgctcatatacactgcatggctacatccaaagtcagagttcctctgccctcatgcctcttgaagtgaacgaaatgtgatgaccttctgcagggtgttttttagtcctctgtggaccctaggctggccttggcatcttggctcacctgtcccagagttactactattaagattacaggtgtgtaccaccatgcctgccaattacctctcactttaaataaaatatgacattt

SEQ ID NO: 293 - protein, 653 aa, Homo sapiens
MRPLRPRAALLALLASLLAAPPVAPAEAPHLVHVDAARALWPLRRFWRSTGFCPPLPHSQADQYVLSWDQQLNLAYVGAVPHRGIKQVRTHWLLELVTTRGSTGRGLSYNFTHLDGYLDLLRENQLLPGFELMGSASGHFTDFEDKQQVFEWKDLVSSLARRYIGRYGLAHVSKWNFETWNEPDHHDFDNVSMTMQGFLNYYDACSEGLRAASPALRLGGPGDSFHTPPRSPLSWGLLRHCHDGTNFFTGEAGVRLDYISLHRKGARSSISILEQEKVVAQQIRQLFPKFADTPIYNDEADPLVGWSLPQPWRADVTYAAMVVKVIAQHQNLLLANTTSAFPYALLSNDNAFLSYHPHPFAQRTLTARFQVNNTRPPHVQLLRKPVLTAMGLLALLDEEQLWAEVSQAGTVLDSNHTVGVLASAHRPQGPADAWRAAVLIYASDDTRAHPNRSVAVTLRLRGVPPGPGLVYVTRYLDNGLCSPDGEWRRLGRPVFPTAEQFRRMRAAEDPVAAAPRPLPAGGRLTLRPALRLPSLLLVHVCARPEKPPGQVTRLRALPLTQGQLVLVWSDEHVGSKCLWTYEIQFSQDGKAYTPVSRKPSTFNLFVFSPDTGAVSGSYRVRALDYWARPGPFSDPVPYLEVPVPRGPPSPGNP

SEQ ID NO: 294 - DNA, 213 bp, Mus musculus
atggagaacaactctaggcagaggtctcaaaggctggggctgtgttggacagcaatcatacagtgggtgtcctggccagcacccatcaccctgaaggctccgcagcggcctggagtaccacagtcctcatctacactagtgatgacacccacgcacaccccaaccacagtatccctgtgactcttcgcctgcgtggggtacctcctggcttgg

SEQ ID NO: 295 - DNA, 94 bp, Homo sapiens
atgaggagcagctctaggccgaagtgtcgcaggccgggaccgtcctggacagcaaccacacggtgggcgtcctggccagcgcccaccgccccca

SEQ ID NO: 296 - protein, 418 aa, Homo sapiens; identical to SEQ ID NO: 11

SEQ ID NO: 297 - protein, 4 aa, Artificial Sequence
  Description of Artificial Sequence: Synthetic peptide
SGGS

SEQ ID NO: 298 - protein, 4 aa, Artificial Sequence
  Description of Artificial Sequence: Synthetic peptide
GGGS

SEQ ID NO: 299 - protein, 5 aa, Artificial Sequence
  Description of Artificial Sequence: Synthetic peptide
GGGGS

SEQ ID NO: 300 - protein, 5 aa, Artificial Sequence
  Description of Artificial Sequence: Synthetic peptide
EAAAK

SEQ ID NO: 301 - DNA, 1254 bp, Homo sapiens
atgccgtcttctgtctcgtggggcatcctcctgctggcaggcctgtgctgcctggtccctgtctccctggctgaggatccccagggagatgctgcccagaagacagatacatcccaccatgatcaggatcacccaaccttcaacaagatcacccccaacctggctgagttcgccttcagcctataccgccagctggcacaccagtccaacagcaccaatatcttcttctccccagtgagcatcgctacagcctttgcaatgctctccctggggaccaaggctgacactcacgatgaaatcctggagggcctgaatttcaacctcacggagattccggaggctcagatccatgaaggcttccaggaactcctccgtaccctcaaccagccagacagccagctccagctgaccaccggcaatggcctgttcctcagcgagggcctgaagctagtggataagtttttggaggatgttaaaaagttgtaccactcagaagccttcactgtcaacttcggggacaccgaagaggccaagaaacagatcaacgattacgtggagaagggtactcaagggaaaattgtggatttggtcaaggagcttgacagagacacagtttttgctctggtgaattacatcttctttaaaggcaaatgggagagaccctttgaagtcaaggacaccgaggaagaggacttccacgtggaccaggtgaccaccgtgaaggtgcctatgatgaagcgtttaggcatgtttaacatccagcactgtaagaagctgtccagctgggtgctgctgatgaaatacctgggcaatgccaccgccatcttcttcctgcctgatgaggggaaactacagcacctggaaaatgaactcacccacgatatcatcaccaagttcctggaaaatgaagacagaaggtctgccagcttacatttacccaaactgtccattactggaacctatgatctgaagagcgtcctgggtcaactgggcatcactaaggtcttcagcaatggggctgacctctccggggtcacagaggaggcacccctgaagctctccaaggccgtgcataaggctgtgctgaccatcgacgagaaagggactgaagctgctggggccatgtttttagaggccatacccatgtctatcccccccgaggtcaagttcaacaaaccctttgtcttcttaatgattgaacaaaataccaagtctcccctcttcatgggaaaagtggtgaatcccacccaaaaa

SEQ ID NO: 302 - protein, 418 aa, Artificial Sequence [sequence omitted]

SEQ ID NO: 303 - DNA, 1254 bp, Artificial Sequence
  Description of Artificial Sequence: Synthetic polynucleotide
atgccgtcttctgtctcgtggggcatcctcctgctggcaggcctgtgctgcctggtccctgtctccctggctgaggatccccagggagatgctgcccagaagacagatacatcccaccatgatcaggatcacccaaccttcaacaagatcacccccaacctggctgagttcgccttcagcctataccgccagctggcacaccagtccaacagcaccaatatcttcttctccccagtgagcatcgctacagcctttgcaatgctctccctggggaccaaggctgacactcacgatgaaatcctggagggcctgaatttcaacctcacggagattccggaggctcagatccatgaaggcttccaggaactcctccgtaccctcaaccagccagacagccagctccagctgaccaccggcaatggcctgttcctcagcgagggcctgaagctagtggataagtttttggaggatgttaaaaagttgtaccactcagaagccttcactgtcaacttcggggacaccgaagaggccaagaaacagatcaacgattacgtggagaagggtactcaagggaaaattgtggatttggtcaaggagcttgacagagacacagtttttgctctggtgaattacatcttctttaaaggcaaatgggagagaccctttgaagtcaaggacaccgaggaagaggacttccacgtggaccaggtgaccaccgtgaaggtgcctatgatgaagcgtttaggcatgtttaacatccagcactgtaagaagctgtccagctgggtgctgctgatgaaatacctgggcaatgccaccgccatcttcttcctgcctgatgaggggaaactacagcacctggaaaatgaactcacccacgatatcatcaccaagttcctggaaaatgaagacagaaggtctgccagcttacatttacccaaactgtccattactggaacctatgatctgaagagcgtcctgggtcaactgggcatcactaaggtcttcagcaatggggctgacctctccggggtcacagaggaggcacccctgaagctctccaaggccgtgcataaggctgtgctgaccatcgacaagaaagggactgaagctgctggggccatgtttttagaggccatacccatgtctatcccccccgaggtcaagttcaacaaaccctttgtcttcttaatgattgaacaaaataccaagtctcccctcttcatgggaaaagtggtgaatcccacccaaaaa

SEQ ID NO: 304 - protein, 16 aa, Artificial Sequence
  Description of Artificial Sequence: Synthetic peptide
KRPAATKKAGQAKKKK

SEQ ID NO: 305 - DNA, 2174 bp, Homo sapiens
agtgcagcccgaagccccgcagtccccgagcacgcgtggccatgcgtcccctgcgcccccgcgccgcgctgctggcgctcctggcctcgctcctggccgcgcccccggtggccccggccgaggccccgcacctggtgcatgtggacgcggcccgcgcgctgtggcccctgcggcgcttctggaggagcacaggcttctgccccccgctgccacacagccaggctgaccagtacgtcctcagctgggaccagcagctcaacctcgcctatgtgggcgccgtccctcaccgcggcatcaagcaggtccggacccactggctgctggagcttgtcaccaccagggggtccactggacggggcctgagctacaacttcacccacctggacgggtacctggaccttctcagggagaaccagctcctcccagggtttgagctgatgggcagcgcctcgggccacttcactgactttgaggacaagcagcaggtgtttgagtggaaggacttggtctccagcctggccaggagatacatcggtaggtacggactggcgcatgtttccaagtggaacttcgagacgtggaatgagccagaccaccacgactttgacaacgtctccatgaccatgcaaggcttcctgaactactacgatgcctgctcggagggtctgcgcgccgccagccccgccctgcggctgggaggccccggcgactccttccacaccccaccgcgatccccgctgagctggggcctcctgcgccactgccacgacggtaccaacttcttcactggggaggcgggcgtgcggctggactacatctccctccacaggaagggtgcgcgcagctccatctccatcctggagcaggagaaggtcgtcgcgcagcagatccggcagctcttccccaagttcgcggacacccccatttacaacgacgaggcggacccgctggtgggctggtccctgccacagccgtggagggcggacgtgacctacgcggccatggtggtgaaggtcatcgcgcagcatcagaacctgctactggccaacaccacctccgccttcccctacgcgctcctgagcaacgacaatgccttcctgagctaccacccgcaccccttcgcgcagcgcacgctcaccgcgcgcttccaggtcaacaacacccgcccgccgcacgtgcagctgttgcgcaagccggtgctcacggccatggggctgctggcgctgctggatgaggagcagctctgggccgaagtgtcgcaggccgggaccgtcctggacagcaaccacacggtgggcgtcctggccagcgcccaccgcccccagggcccggccgacgcctggcgcgccgcggtgctgatctacgcgagcgacgacacccgcgcccaccccaaccgcagcgtcgcggtgaccctgcggctgcgcggggtgccccccggcccgggcctggtctacgtcacgcgctacctggacaacgggctctgcagccccgacggcgagtggcggcgcctgggccggcccgtcttccccacggcagagcagttccggcgcatgcgcgcggctgaggacccggtggccgcggcgccccgccccttacccgccggcggccgcctgaccctgcgccccgcgctgcggctgccgtcgcttttgctggtgcacgtgtgtgcgcgccccgagaagccgcccgggcaggtcacgcggctccgcgccctgcccctgacccaagggcagctggttctggtctggtcggatgaacacgtgggctccaagtgcctgtggacatacgagatccagttctctcaggacggtaaggcgtacaccccggtcagcaggaagccatcgaccttcaacctctttgtgttcagcccagacacaggtgctgtctctggctcctaccgagttcgagccctggactactgggcccgaccaggccccttctcggaccctgtgccgtacctggaggtccctgtgccaagagggcccccatccccgggcaatccatgagcctgtgctgagccccagtgggttgcacctccaccggcagtcagcgagctggggctgcactgtgcccatgctgccctcccatcaccccctttgcaatatatttttatattttattattttcttttatatcttggtaccaacgccccctttaaagcggctttgcacaggtca

SEQ ID NO: 306 - RNA, 20 nt, Artificial Sequence
  Description of Artificial Sequence: Synthetic oligonucleotide
gacaagaaagggacugaagc

SEQ ID NO: 307 - RNA, 20 nt, Artificial Sequence
  Description of Artificial Sequence: Synthetic oligonucleotide
aucgacaagaaagggacuga

SEQ ID NO: 308 - RNA, 20 nt, Artificial Sequence
  Description of Artificial Sequence: Synthetic oligonucleotide
acacaccgguugguggccuc

SEQ ID NO: 309 - DNA, 28 bp, Homo sapiens
atcgacaagaaagggactgaagctgctg

SEQ ID NO: 310 - protein, 9 aa, Homo sapiens
IDKKGTEAA

SEQ ID NO: 311 - DNA, 28 bp, Artificial Sequence
  Description of Artificial Sequence: Synthetic oligonucleotide
cccctactgcctcgcctaggtcctgggc

SEQ ID NO: 312 - protein, 5 aa, Artificial Sequence
  Description of Artificial Sequence: Synthetic peptide
PYCLA

SEQ ID NO: 313 - DNA, 20 bp, Artificial Sequence
  Description of Artificial Sequence: Synthetic oligonucleotide
ggacctaggcgaggcagtag

SEQ ID NO: 314 - DNA, 20 bp, Artificial Sequence
  Description of Artificial Sequence: Synthetic oligonucleotide
gacctaggcgaggcagtagg

SEQ ID NO: 315 - protein, 6 aa, Artificial Sequence
  Description of Artificial Sequence: Synthetic peptide
VQALCY
